United States Patent Application Publication US 2026/0357268 A1, published November 12, 2026 (application 19/705,373).

The application's sequence listing, which the Patent Office published only in electronic form, follows.

SEQUENCE LISTING (567 sequences)

SEQ ID NO: 1 - DNA, 67358 bp, Homo sapiens
  source 1..67358: mol_type = genomic DNA
agtcctcccgtcttgcgccgcggccgcgagatccgtgtgtctcccaagatggtggcgctgggctcggggtgactacaggagacgacggggccttttcccttcgccaggacccgacacaccaggcttcgctcgctcgcgcacccctccgccgcgtagccatccgccagcgcgggcgcccgccatccgccgcctacttacgcttcacctctgccgacccggcgcgctcggctgcgggcggcggcgcctccttcggctcctcctcggaatagctcgcggcctgtagcccctggcaggagggcccctcagccccccggtgtggacaggcagcggcggctggcgacgaacgccgggatttcggcggccccggcgctccctttcccggcctcgttttccggataaggaagcgcgggtcccgcatgagccccggcggtggcggcagcgaaagagaacgaggcggtggcgggcggaggcggcgggcgagggcgactacgaccagtgaggcggccgccgcagcccaggcgcgggggcgacgacaggtcagtgttgccgcggcctgcgccaggcggcgctggctcccctccgtcactcggccggccttcggggcccgctgtggcgaggtcgacaccccccttccccgccccccgccgccgaggcgagtgtttgggggcgcgtggtccgaaggggctggtgccagaagtaggcccctggtggccgcggctgctgcagccgtaactgtcagtcctggctgagcgacggcgggagggttttgtcgcccgaggggacgcgagcgggcccggggcggggcgggacgtgcgaggcgtcgagatttgggcctcctaggagccaggctcttcgagccagccggggccccagacagggaagggcaggccctttccttcaaaggggagccctttctcggcgttttcaaggtttttggctctcttggggaagacatatttagccgtgtgcttggtgggttggggttttgggggtggattgatgggaagggagggcggatgaagtggtatgtcaagcccaagggttgtgcgcacaggttactctgtgttaccggccaccaggatttctgaagttgaacgtgagttattggctttgccagagactgctgtgttatatgcagacctgtatgcaagcagttggccttttttccccccccttttcagtgtagaaaatgaaaaggatgctttcctcatcttggtggtaaaggcttttgttggtaaaggtagaattgaatgtaccaaatgccttagtccgtaaaattttagaaataattttaatacagacactggtgaagcttggcaaccttgaaagagaatttagcgtctacattttttaaatgactttttatggatatgctaaattagtaacagtccaaaatctgtttgagattattaagtggcgagggtgctgttgaaaatgtaaactaatagcatatggggtttacagtgcacagttaacctcaatcatgaagaaatgtggatatgacccgtaattttggatcattttactgcctgcaatattgagagaagcagcaaattattacagttttttttgggagacgacctaaagtttaagaaatacaactgttgaaagttacctgtcagagacacaaaggtacccaatcaatcttgttgaataaattggacaagtgggataaggtgtttgtctcacacttctgatcaataagtactcttacttaagaagtgatttggtaaatcatgtaaaatttagaatttaggagagataagaaagttgtaacttggtgtgtatagtggaaatagctttgaaattagatcctgtttttaaatccaagctacttaccacatttttagtgaaatgaatacattattaatgatgctactgataagccctaaggatgaccagaagcccttttaagaaacactaatacagttgaccaaaaaataaaaaaggaaatagcttcaagaaataattttcaatctttgtgtatttataatatacacaggagaaataaaagaacagaatatgaagaggtaacttataatctttacaaaattagaatgtaaactatgctagtcttactgtgtcaatatttattaacctgcattagtttgctaagtagtatgctcactatcctctggacattgcccctgtccctgaggagcttaactttatacagagatacaaaatactgtgttttgatttcctttcagaggatttataagctacttatgttttatctgtcctaaattctgcccttttttttcccatggctgaaaaaataacttcctaagaaaggtacatactagtcagaggtgtggggaaaacgtgttctcatcccacttgtgcagtccatttaacaggatttattgggtacctacagtgtctttgacatgtaacatttaatcagttgtatttcttaaactttagataatttctatttcgatcatttctatttcaatctcctccctctcccctccaaaaaaatttactgtgtaaactgtgataatacactgtttctctcagtgtcagtcagtggaatgatccagatttataggtcatagcaaaatttttcatcccaagctcttgaaatgatgtttccaaatgtccattttcttaaatgactgctagttatgttctccaatcatgttacacatattttgtttagacttataattgtgtaggtctaaatgtagaaacattacattatgtacatatgcagctgctgaaagaaaattagttttctaatttttagatcggggtgaagacaaacttttagaagtgatctttcggtaaaatactggatgaagtcttaggtgctctttttatgttggttcaggacaaaagttttttgactgctttttgagttttcccctcactgccaaatgtaaggataaaatgtagtaacaagacatcttggtatgtatagtggtaatatctttggaattagaccctaattttaattctggccttattaatcttggtaagccacagttttgtcatctgtaaaatgggttggtgaaacttccccagagttgtgaggcttaaagtatgtaaaacgcctaacacgtaggcactcaataagtattaccttagaaatcttcctatccagtttttctgaatggtctggaagcaccttgtatgtagtggactacagcatgttatcctttatgttgtttatttcttttctcattagctatgaactttttaaggccaggaattcctagtgtttaccagagaatgtgttactagatgtcttagtctgttctggctgctattacaaaacaccacagacagcatggcttataaacaacagaagtttatttctcacggttctgggggctgagaagtccaagatcaaggtaccaacaaatttgacatcttagtgagggccctcttcccttgttcatagatagctagctgtcttttcaccattacctcatgtagtagaagagtagacggggctctatagggcctcttttatagaggcattaattccattaatgatggcaaagcttcccaaaggccccacctcttaatactatcaccttggaggttaggctttcaacatgaattttgggggacacattcagaccacagcactagagcaggcatgaattggttattggtaaatcagtaaatgatcaactaacatttattaggttcctcctgtggcttctatgagctgagctaagtacaggacccacaaagacaagaaagatgtctgtcttttttgaatgcttatagttgagtgactttctcacatttgtgtgtgtgtgtgtgtgtgtgtgtgtgtaaaaccctatcacataatggaacttcattttcccatgcccttccaatctaagagcagttctatggactcaatacctcctacccaccagctgctactgtaaagatttacttttttactccttttaaaaagttcaaccctctggcacatgcattacttcattccttggtcccagcccaccaccccagtatctggcacgtagtgtattagtatttgtgtgtgtgtgtgtgtgtgtgtgtgtgtgtgtgtgtgtgtgtgtgtgtgtatgtatatagaatttaaaatttttactccggcagttgtcttcaaatactctaattttggggggcatgattatcattctgtcttctggcagtacatggatagatgctacctgagtaggattgtctatgaggtcagctgctccagtcattttatacaagaggaaattggagtgcaaagctttaaaatgattttcttaaagtcacccaggtgtcagaaccagaaccagagtccatgtctctagttcaggactctgcacacattggcacatgttctgtcctaccttttgggatgaatagttatacttgctttgtgattactcacccacctttttggagacatatgagtgttttgtacactattaatagaaggcagccttcacaaaatgccatctgcagatctgttatttcttctaataaaggaaatgatgtaaaattaccttaaatagaaatagtgttaattcttctggagacatattccataatccaaacacgaaatgtttgaaatacttgaagatgccatataaataagtcctttgtaaaaagataatattaaaaatttttgttttatagagatgggggtctcactgtgttgcccaggctggtcttgaactcctcagcttttactttagcttcccagtgtgttgggattacaggcatgagccacaatacctggccaagtccttttttttaatcaaatgacttattaatacacagtttctttgccagcttttgttttcatttgctatcaaaaatgttgcttagtagtgctttgatctgagttatcaataacaggtaaatgccattatggataataattcaaaaagaagcttattaattattaggcctatctgagagtgaagtaaagttagcattttctttttgtttattttacttattgtttatttgtttagagacagggtctcgctgtgttgcccaagttggagtgcagtggtgctgtcataactcattgcagtctcaggctggagtgatcctcccatctcaccctcctgagtaggtgggattagcatatgccaccatgcctggctaatttttttattttttaatttttttgtggagatggggtcttgccgtgttcaggttggtttcaaactcctggtctcaagcggcttggcctcccaaggtgctaggattacaggtgtgagctaccatgcccagctgagcatttttaaaaaatactggtctttgtacatgagtcgttactatttgattctaagccttatgactgatatccctaaaaattatttataaaattttaagtgcatcagagtcattgaaatggaatgagcactgtcttttggtcttgaggttgttttaactagcttcgtaatggtcatgagcaggttatttagcttttgaagccttcgttccttcttttgtcaaatgaaagtgatagttgctttgttttaaaagagtatgcttttcaaacgtgatcattcttgaaaatgtagattaagagctttttagaggccaagtgccatggctcacgcctgtcatcccagcactttgggaagccgaggcgggcggatcacgagatcaggagatcgagaccatcctggccaacacggtgaaacctcatctctactaaaatacaaaaaaaaaattagccggacgtggtggcgcatgcctgtagtcccaactactcaggaggctgaggcaggggaaacgcttgaacacgggaggcggaggttgcagtgagccaagatcatgctactgcctggcgacagagtgagactgcctctcaaagaaaaaaaaaaaaactttttagaaacgttgttttggggaatttttagtgtgtgaattcattttaaatatgtgaactccatttgacatggacaatggatcttaatagtttgtgatacattattcagtgtattaatcaaaagtcaaatctcttttgtaatttgctgtaccagacctgttgtgttaatctgatcaatggcaagtgaatcataagattgacctgaaaggaaaagatatttttaggggacatagaatcatattggataagattattcctatagttcattttcaggaaatctgaacaggaatctcgtgtaaggaatcacatgtgaattatagaagagagtctgatgtaagactttatttattaaggtctgcatctgtgtttcaagtaagagcatagaggtagtatatgagccctgaacactcatacaagtaggataaaatttttcttaaaactgttggctggacagtgtagagtctaatgctgtgactcttaacagttttgtgtgttccagaagttcatctcctcaggatcaattgaggttagtctagcacagactttagttatagaaaccaaacatgagaaaaattttttgacccatgtcttcgtagcatgcaggcttggtagctctttcctagttctggatgtgtgcccgttgtatatactttcagcaattcaggatgttccttttcatatttaagacaagcactcttgcatacaaattacatagctgtgggctgaatgaagatgctaccattgctgtacttctacacaggttcttttcatgtaatgaaatcagaagggatggcttttccatttcaagcttctgttaataagtagtcttagaattgcctttgtgtactgtagccaacaccccaactcatatatttttataatctttgtgatgcagaataaattctgaaactttccacctcctaattaaatatagaaatactgaaaacaataaagcaccatgtattcactatggacatatgtcacattttgtcactttcttgcactcttgtaatccctctctaaagctcatgttaaactcatgttctttattttcttctcagatgattcctttggcactgcatgtaacagtacaggaatttcttcctttcgtacttccaacaaatacttttttgtctcttaacagatgtgaaccataatgctgttctttagaaagcaaaggatgaagtgcacagcagtgttttctatataaagctaatgggtcataaggggaaatatgggttatttccagcttgttaattgtcttaatacatttttcctaagaattctattgtgcctctgtggttatatgcaccaatattgataatcttacagcgtgccataaataaggatttttatattatctttgctaaatattttaagtttttgttttgggaattgaaaaaatcttttgtgcatctatggtatgtgatacgtatactaatggataaatcctgtttcacacaaagattaattgggtaacatttttctttcctagttttctgaagtcagtggtcatgttgtgtgttggtgattgaaaatatgctgtttaggctgggcgccttggctcactcctgtaatcccagcactttgggaggccgaggcacacggatcacctgaggtcaggagttcgagaccagcctggccaacatggtgaaaccctgtctctactaaaaatacaaaaattagctaggcgtggtggcacacgtctgtaatcccagttacttgggaggctgaggcacgagaatcgcttgaacctgggaggcagaggttgcagtgagctgagatcacaccattgcactccagcctgggcaagcaagatttcatctcaaaaaagaaaagaaaagaaaagaaaatatgctgtttaagatcattcaaattcagtttctaagaagtgtaaagttttcctaattacttaagctgcttcattctcattcccttttgtaacacattttgccatctctgtaacatgttgaacatgtttaaagaacagagtgggagaataggaagttacgtggataaagtttggtaatcaaggtaggaatacatcctgcttcacagaatgggaatatttctgaaaagttgactgtagtattgaagaacacttaagtgtagtgtattagacgaactgagctaattttggtcttttatacacataaatcaagatttctgcatttcaaatcatgcatatttctttaaatttattgctcagtgtactgtatttcaaatattgtaaaaatgaaaagatcttgtggtcttatttaactcagtatgggataagtccttcccaccttcccattcttattccctcttttaggctgaatgaaaggctgggggagtgaatttaaaaatagatggatctcagctggagaatgggttggtcacgtatctcaactgatattaaataatttcttaaatcctggattgaagattataagaaaacagtaaatgtttgctctcagttcatttctttgttttgttttttcatgtacagttttaggcacttgtaactgctggatgcatgaactactttctagttctttcaggcctacttttagatatctgctgtggggacagtcctcaacacttaaagtaattttaaatagtgataggcagaactaggggtcagttttactgcctatgcctgtgctgaatttgacatggcattcctaggaggggaggtggaacgagggcggtgcacacattgtccatattgctagtcagtgccagattttgagaaactggggctaatctctctcttaaatggtcaagatctaattccccaaagtgctgtttcagataacctagtatttgtccaaaattgccctgctacaatagtatttatcttatatatatgtattatatatataatatatatataatcttatatatatgtattatatatattatatatataatcttatatatgtattatatatataatatatatataatcttatatatatgtattatatatataatatatatataatcttatatatatgtattatatatataatatatatataatcttatatatatgtattatatatataatatatatataatcttatatatatgtattatatatataatatatatataatcttatatatatgtattatatatatataatacatataaatatatatatatatatatatataggtttttttttgtttttcctcctgagatgtagtctcgccctgttgcccaggctggtgtgcaatggtgcagtcttagctcactgcagcctccgcctcctgggttcaagtgattctcctgcctcagcctcctgagtagcagagactacaggtgtgcactaccacgcccggctaatttttgtatttttagtagatacagggtttcaccatgttggccatgctggtttcaaactcctaacctcaggtgatctgcctgcctcaacctctgaaagcactgggattacaggcatgagccaccacaccaatcctattacattcttaaaaaaatgtttgtttgtttgtttttgtagagatgaagtttcactatattacccagcctggtcttgactcctgggctcaagtgatcctcctgccttggcgtcccaaagtgctgggattatagacatgagccactgcgtccagcctgtatcatatttttattctgatatcttttgtaattttgtttttagtgaagtagggaggtttatattagataatcttccaaggtaattatcagcttggacattatatgctaatatgtcttttgtttgtttttaaaataagtgtatatgttttaattgtaaaatttttaaaacatccagaaaatgacatagcaagtgcctatttatccaccacctggaaatataaattatgtccatttttatcccttgggggaaaggatgcagttatataatcacttttaacaaccccaactgttcaagtcctgttacccgtctctacacaaagtaacaactgtcttgagattcttaagtaaatttcacatccttgttttatacttttactatacatgtgtacatgtatctgtaagtgatatgtggtgttggtttttgtattaaatttttacagacatgtataacgctgtctttcaatagcttgatttttttaaactcagtatcaagtttttgaggtgtatatgttgatgcgtgtacatgtagtttattcagtttcactgctgtatggcacttcattttatgcatagataaaatgtatgtgtcccactattgatggatattttgagttgttttctttttgctattataaataatgctgcagtgtttatttttacatgagtgtatgtgcaggtgttttgggaaaaaccgtagaagtgaaattgctggttactagatattggtaaattcttttcctaaatggatatgcccatgtatactttatcagcattatgtgggcatttctagcatcctcacccatacttgggattgtcagattttaaaatagttactaatttgaggcatgtgaaatgctatctcattttaatttacagttgcttgattattctgaatcgtaggtaaaaggataggaaatttattattttctgtatgttttaaatatctcaaaaataaatgtttttaaaggaaaggcacactatcgtacaacatttatgttgaaaaggaccatgaagatcatttcatccaaccttcttactttacagtgcagccaaagaaagttaccagaataagagtaaaatataaaatcctgcccattgtagtattctctggtagtatgagccttaatttttgatgtaaaaatcatgtctttttctttatgattgtgctttttgtttaagaaatcctctttttatattgtctgctaatagttgaggattttttgttactctttgttatttgcatttaggttcatctgaaaggagttaggattttttattttaaatatgaaaagctagttgttccagcattaagtattgaatttttaaaattttgtattgaggttaaatatacatacataatttaccatcttttttaagtgtacagttcatttttaatgattttttaagtgtacagttttttaagtgtacagttcagcaataataaatacagttatgttcttctgcctttgtcctctcactccccacttcggctgctagtaaccaccagtctatgcttatcttcttgagatatacttttttagcccatgtatgagtgagaacatgtggtatttgtctttctgtgtttggcttatttcacttaacataatggcttcttgttccatccgtgttcctgcaaattacagggttttattcttatttttatagctgagtagtattccactgtgtgtataaactacattttaaagtctattcgtcctaattattgaattctccccaccccacccacctttttttttttttttttttttccaggagacagggtctccctctcttccccaggctggagtgcagtgccatgatcatagctccctgcatccttgaaccccctggcctcaagcgatagtcttgcctcagcctcccaagtagctgggactgcaggcaggcacctccaggccctgctaagttttgtgggtttttttttttttttttttttttttttttgtagagatggggtcttcctatgttgcccactttggtttgttagttttagtagtttataattcctttgtattattgtgaacaaataacagttattttgaaatagaagagtgctttctatttaaaattttgctttgatagggttctgtctactttctgagccttaccttcctgtgcattcccctttggtcagtaccatcttaccacacaggctgcttttagtttcttgagttatccatcttccttctatcttatagggctcaacctaaatattactcagggaagccttccttgagagtctttctttttgcactcattggtttggggcttctttatattatactgttaattgaattctgagtcgtgtttatctcaactgagattaggtaatttattttgagaacagtaaatgtttatcatctgtcattctttttttcatgcccacattcagttatttgtaagtgctgaatgtataagtgttcatctacagataaggatcagttcttttttccccaactagaaatgttactccagttgataataacagctcaaacggaaatataaggcagaggtgagagagtcacttgaggccacgaattggagaccagcctgggcaacaaagtgagaccttatccctatgaaaaataaaattagcccagcttgggaggctgaggtggggggattgcttgaaccctggagttccaggctgcagtgagttgttatcacaccactgcactccagccgcggtgacagaccctgtcccttaaaaaaaaaaaaattataaccagccacattgaaatattttgtaagacattaatagaagactaaatgttctcatatgtttactgtttgtgttaagtacgtatggtttttagaacaacagttttctatcaagtgtggtctggttcacttagaattagatggggtagattttttgaaaagcgttttgaagttaaattagaagctaatggttttttgtcactaaatcaaattttgttttatgcgtttaagtgctacatttatttgataggcaggtgaatgtaacagattaaacttgaaaataatgtagctatgattccttcaaggaaaaacccacctacctttagttcttttagtatattgcattataagtcttttgtgtgtgcatatatagcaggcataaattggcataattctgggtttaattttaggctaggcgctatggaagtttgaactctaattacagtgtaaaaataacccagaggaaaatttcagaataataaatcattgggactatatggtacagatgtccctgttttcagattgtagaattgttgaccagtaggaatgctttatgattaaaagccaggaaattaaagtaattctgatgatttggtatttctaaagattttcatagatgacagttgagaactactctcagatgagattcttccattgctggtaagtcatgtaataaaacacttaagtaaatattttaatgaggaatgataacattttaatattggcacattgtgagtctaccttctgtagttagtaggtaaataagaaataaacataccttatttaaaaaaaaaatttcaaagaacccaagggaggggagagccaaggtgcacattagaaggagattacagtactcttccagtgcacagtggatgtgttgtgattccagagttctatgtatgtatgactgtgtagcccagatttaccagcatgggctcagttttaaatgttaggttaggctcataaatcatgaaaagttcctaggaattctaacatttttacatttccagaagagagcctcttgtattttgtggtagttgccccaccatccctcaaatattggtgtgtagaatctatttttgaggatgaggaaatacagaaaagaaaaataaaaagctatttttttttaagtataagaagaaatgaaaggtttctcttcgcttcatagccaattctaaaacttaacagttgttaagtgtgtttaactgtagagggaaaaaaatgcctggaaggaaattaccaatcaaatataaaatgtaagatagctgtaaaagtactgatatacatacagcttttttccttttggggaggcagtatttaaaaaaaatcctaccaaacatattctctaactttcaaaactgttaatagctttattgagataattcacatactataaaattcacccttttaaagtttttagtatattcacagttctgcagccatcaccactattgaattttagaacattttcatcatccccaaaataaatcctaacctgttagcagccattccccattctttcctggcctctggaaaccactaatctgctttgtctctatgaatttatttattctggatatttcatataaatgggaatcatacagtatgtgtccttttgtgtgtgggttcttttacttaccatggtattttcaaggtatgttcattgacatgtatgtctgttttttttgggtaacacacactcttgattactgtagctttgtagtaagtcttgaaaccaggaaatgtgagtattctaacttattctttttcaaaattgttttgggtctctgggtttctcaaatttccatagaattttagggttagcttgcaaaaaaatgcaactgggattttaataggacttggatttgtgttgaatctgtaggtctatttgggaagtattgctaccttaatactgtcttctcattcatgagcatgggatatctttccatttattaaggtgttctttaatttctttcatgttttgtagttttcagtatacaggtcttgtacttattactttaaaaatttatttctaagaattttatgttttgatggtattgcaaattgaattttttaaaatttcatttcaggtttttaattccttgtgcatagatttttgtgtactaaaacttgtgtttcatataatttttttttcctcttaactgtgttataggaatctttcaaatggttggctacatacacatccatctgattcacttagtaaacatttcttgaacacctactgtgtagtgggcctttttttctaggtcctggtagagacagcagtgtataaaacccactcagtcctttgctttcatggcacttaaatcctaaaaagagatcataaagataggtaaaatatatgttacatagtgctaaggagaagaaacaaataagggaagtgtttgcaggtgaaaaggatgatgggaaattttagatagggtaggtagagaaaacttcactgaaatggtaacttgggtgaagaactgagggagatgagagagctagccatgtggatatttgggggaagagcatttcaggcagagtgtagtgaatagggaaaccccaaagtgagagtgcctgatgtgtttgaagaactcgaggtgtggccagtgtagctttagaaaagtaattgatgggaaatagagagaatggagggtacagatattttgatcataataaggtgtttgatttttacctataagtgagatgggaagctattggaagtctttgagcagagtagtgaaaaagtatgacttatgtttagcaaggtcactctggttgctgtgttaatcatagactgaaaaaggggacaagggcagaaacagaccaattggtagaccattagtacagattaagacgtgactgaaatggacagagtggtcacagtgagggtggtgagaagtggttgaattcttgatatatgttgaaatagagtccataggatttggtagtagaccagatgaaagtgggaaataaagggaggagtaaaacatgatgccaaagttttttgaccagagcagctgagagaatggagttggataattcttataaattattgcattaaatctgtgcatcatatcacatgcccacttaactacaggtaattttaccatataagcttgtggggggaaaagaggaaaaacagaaaaaaggatggaaaagcatgttttaaaatataataaattaggccttaatgaaaaattgtccttgagaaacctgagatggaatactctaaatctgatgtgttctctcaatctttagaactgaactaggaattaactctgagagttcatgatgttatgagaccctttgcctgttttggaaattcggttgttttcaatatttgcttttgcaatgatggtacctgttattttttctgtaaggtagattcctacaaataagatgtcaggccattagatcatgtcaatctaaatatttgataggttttgccaattaccttttaaaaaataattttagcaagtttcattccttaaaatatattagggactgctcatttaccttgttttgattcatgtatatataaaatctgtttaagtctttataaataacctgggaaattgcctggttttttggtccatttctattgtggtgtttgttttttaaatttgtaagcattctttatatatcatttaattctttattataatttgcaaatattatctctacctacctttaattttatagtatctagtcatgtgaaattttaaagtttttatgtaggcaaatctgtccatcttttatggtttctgggtttcagcatgctaacaaagttgatataaatatgatctcatatatatattacaaaaactttttagagataggatctcactctgtcacccgggctggagcaaccatagctccctgcaacctcaaactcctgggctcaagtgatcctcctgcctcagcttcccaagtagctaagattatagacatgtgccactatagctagttggtttttttttggttggttggtttttttttttttttttggtagagaacgtatctcagtgtgttgcccagactggtctcaaacttctggcctcaagctatcctcccacctcagcctcccaaagtgctgggattacaggcatgagctactatacctggccaatctcttgtattttcttctgatacttttgtgattttactttatagactttaatttagaaagttagatatgagcattcagcatatttttggatatggtatgatatggtttagatctggattgcatttgtcatggtttgggaattatatctaccttttattttcttccacttgggtagctgattgtcttgtaaggcatcctttccccactgataatgccacctttttctatattaagttctcacaaactttgaaaaaaatcaagtttattgatgtataattgatacacaatgaaatgcacccattttaactatatagttttattgattttgataaatatatacactatcactgctactacaatcaagctttagaacaattgaattacctccaaaaagttccttcctgtctgtagtcatttctccctcttggccccaggcaaccactgatctgtttattagttttcctactctagaattgcatatccatggaatcaagtaacatgtactcttccatgcctggtttctttcacttggcatgtttttgagattcatccaatttgtgtttgtcacagatttttgtttgtttcgtttttttaaatacaatatgactataccacagttcattcattttctggtgaacatttaaattgttttcagttttaggctgttgcgaataaaggtactgttttgtgtgcatgtttttgtgtgaacatatgttttcatttttctagggtaaataccttaaattggaattactgggtcacatggtaagtttatgtttaaatgtataaggaactgccaaactattttccagatgattatactactttacattcccatcatcagtgtatgagagttccagttctccaaatgtcagcatttgatgttctcagtctttaattgcacacgttctgagaggtgtgtagtggtatcccattgcagtgtttttttttaagtggtactaaaatacacaacatcaaatataccattttaactatttttaagtgtacagttcagtgacataaagtacattcacattattctgcagccatcaccactatccatctctgaaactttttcatcttctcagtctgaaaccctatccattaaacagtaactcttcattgcctactctccctatctgctggtaatcactgttctacttcatatgtgaatttgactcttccaggtacttcatataagtggaatcatacgatttttgtccttttgtgtctggcacatttcatttaataataataatgtccttgcgttaggccattcttgcgttgccttaaatgaatatctgagactgggtaatttaaaaagaaaagaagtttatttggcccctggtgctgcaggctgtacaagcatggcgccaccatctgctcagcttctggggagccctcatggtgagtttactcatggtggaaggcaaagggggagcaggcgtgtcatatggcgagagcaggagcaagagagagggtggggaagtggcacaccctttttaaacgaccacatctgcgaactcactctgtatcccaaggagagcaccaagctatgagggattgctcccatgacccagttacctcccaccaggccccacccccaacattggggattatattttaacatgagatttgggcaggacaaatattcaaaccgtatcagtcatcaaagttcattcatgttgtagcatgtatccaaatttgattctttaaggttgagtaatatttcattgtgtgcatatatcactttttgttttatttatttatttgtcagtggacatttggactctttgtaacttttaactatgtgaatgatgctgctatgaacattggtatataagtatctgtttgagtcccttcttttaattcttttggttatgtacttaggagtggaattgctgggtcatgtggtaattgtatgtttaatttttttagagactgccatactgttttccacagtgactgcaccattttacattcccaccagcagtgaataagggttccaatttctctgcatcttttctaacacttggtaatttctgttttttatttaaaataattgccattctaatgggtgtaaaaagtcattatggtcttaatttacattttcttcatgactgctgttgagaagttttcttttgtgtgtctgttcaaatattttcacattcttttcagaacatatgttctttgtcagatagataaatgtatttcttctgtatccttactgattttctgtccacttactaattaccgagagaggaatgttgaaatcttcaactataattttgagtttatcttccttctgctctgttcattttttcttcatatgctttgaagcaaagtctttaaagttgtgtccttaggtgtgttcacatttaggactgttagatctccttgattaattgatgtctttatcattatgaaatgtctctgtttatcgctggtaatgttccttatctaaagtctactttgatattagtgtatccattcctttcttatgattaatttttgcacattatatcattttgctgtgtttttattttcagcttattggtcatttaatgtctttcttttagatagcatatagttgcatcttgctttcagattgactttttacgatcgttgctttttgattaagtccatttacatttattgcagttggcaatataattgtgtttaagacactatttgttttctatttgtctaatcttttcttccttttctgccttcttttcggttaatggagcatttttggaattttgtattgtctccattattagcttgtccctctgttttttttccccccagtgatacttctaggatttacaatatgcacctttaacttacctcaatctaccttcaaaaatattattcctcttaatgtataatgtaagaattttggaatagtatacatccatttactctccctcattctttttggtattatgatcttaacattttacttctatatgtgttatagattccacagcagcgtttgaaactatttctttcaaaggccagttgtcttacgaagaaacttaaaaactaagaataacattcctttatatttaccttcatatttaccatttttatttatttttctttgtggagattcctttttgtagatccaagtttgttgctggtgttattttccttttacttgaaaaaatttcttaaacatttctaaagtataggtctactggctacaaaatctttcagcttttgtttgtatggaaatgtctttatttcactcttcattttatcgtacaatttttcaaaccacacagactttaaaataattgtagaatataatttcacaacattttgttctatttgttattgtcttctatcttgtccatctatccatcctgtcttcttctagtgtctttttttatgcttttcaaagtaagttgcagttgttagtataccacacccttaacttgagcatgtatgttaactaaaacttagtagtttagtatttttaactagaatttactatgctgttccagttatttattgctgtgtaatacattgccccaaacttagtgccttaaatatcagcaactatttattttgctcatgaatctctcatttggtcagggattggcaaggagagcttgtctttgacaatacattgtaacaactgtttacatagcattacattgtatttggtattataagtaatctagagatggtttaacatatttgaagatgcatgtaggttatatgcaaataccatgccattttatataagggattcgaagcatccttggattttgggatccatgggagtcctggaaccagtcctctgtagatagttgaggtatgactgtagtctttggattgaaagactcactaatttcactcagattcaaggagaagggccatagactccaccacctgatgaaaaaatgacagtgttacattgttaagagcatgtggaatggcttctattgtgaccatctttggaaaatacagttgaccacatataccatttcatgagctgtgacaaatgtatacacctttgccagaaagttctatcagggtatagaacctacacctcttcctagttattccttccccccacaccacccctagaacctaacattgttcagattgttttcatcttagtttagcttgcgcagaactttatgtaagtagagtcatacaatacttatatgttgtaaaaagtttctttttgctcaacataatgtttttgagattcatccatattgttgaatgtttcggtggtttgtgacttcatctgttaagggacacctgggctgttttcagttccaggctgttttcagttcccagctattataaaaaggtacaatgaacatttgtgtaaaaaaagaagtctctgtgtggacatatatgtttcttttttcttggttagttgatgtgtttttctttcagcatttgtttttgatgagaagtctggttatacagtcatgtgccgcatgctgacatttcagtcaacgagatcatagttgacaatagtcatttaagattataccaccatattttcactgtaccttttctaggtttagatgtataaatacttacactttgttacagttgcttacagtattcattcagtatagtaacatgctgtacagctttataacctaggagcacccgggctataccatgtatcctagttctgtagtaagctataccatctaatctagatttgtgtaagtacgttctatgatatttgcacaatgattaccatgctgagagttgttggggttttgttttttttttctttttgaatctgtacatttatggttttccttaaatttggaagattgttgccattgtttcttctatatatatattttttaccacctttactcctctttcatcatttcctctttttctgggactccagttacacatatgttagactgtttggtattatccacaggtcattaacatcatattcattatttttcagtctttttatttccctgtgcttcagtttgctttgtcttctattttactgttttttctcctcccttgttaaataatttcagatatttcgctttatatttcaagaaattccatttgattcattttattcatgtatttttttgaattcttgagcatatttgtaatagctgtttgaaaatcaggttacttattgatttcttgaattttttcactctgaatttgttggttggttttttctcttggtcatgggttgtattttcctagtatttattttattttattttttgttttttacatatttaatgattttttaagattggatgctggacattgtaatattttgttgttgggtgtctagattttgttttcttttagagtgttttgttttgtagccacctaaataacttgctggtcagttttatcccttcagggctacattggagtttgtctagagaaggctttgctttaatggtagtagctcctacctaaggcatgatccttctgagtctttactaaatgctcccagtgtcaccgtgttctcttcactcaggttagagagaattttaggagtctcccagtcctttataagtactgggaatatttcagcttactgcccctctttcactagcttcatggagtcacttaccttaatcgtgtacagttagtactcagcagtggactctcaaatggcagatttctgaagccatttctctgccttctcagacaagcacttgtctggcacttgtcatcaattttacccacttcagctttctcagctctgatctcttgattctgaactcagtaaaactgctgtcttctcactggatttcccctccattgactgcaggttggaaattacctccaggcagacatccaagcagtggatggctcacctcctttgtttttgtcctttcatgcattatagtcctctgctgcctgttatccaaggtctgaaaattctcgtttgagaaggagcaactgtcagatactttcggatctttctctgaaattagctttctgttgtgcttgttgtgcttacctctttgtctaatgctaataccatatgaggtttttttttttttttttagaatgttttaagctatacacttctaagtgtatagcttgttgcactttcacacactgagcacccgtttagctagcattcagatcaaaaaacagcagcagctcctgcgtagccccttgtgctctgtgtcactaccccttttcttccatgtgtaaccactgtcctgacttctcatagcatagattagatttgcctgttttcatcctttaactagaatcaagcacatttagttgtgtctgacttcttttaatgtatttgtgagatttattcacattgttggttgtagtaattgtttatgatagtcgctgtatattccattttaagaatggaagtgatattccattttaagaatatgccatagtttaatctgctgttacggacatttaatcatttttggtttggaactgttaagaatattgctgctgctctaaacatttcagtgattgtcttcttgtgaatatgtttacttctgtttggtatacttaagagtgaaatttttaagtcataaggtatgcatatatttagtgtatactcagttttttaaaggcatgccgattttaattattccatttaagttaatatgttttaatatctggtagagaaaggaacattattagaaacaattgttttggttattcttacatatttagtctttgaaaaaacgtttcttaaattggcatttacttatatttgtgttaatttgggaagaaatggtatctttgttcatctatgagtcacatttggaactagctcaaaggccatgggtcctgattccttttttttttttttttttttcttgtagaggggaggtatggtgtcaagaaaacatagtcaccattattacgaaaagtaaaatatggaagagatgatccctaccatcaatcagcttacaactagaggcactgacaaatgtatacagatagctgtaatgtaaggtataacataataaatataaggagaaattaataaattattttatggtattaagaatgtataataagacatgaaggagatggtgattatgtataagagtttagataaccctgtgagatacagtgtttagaatgaggccagtttttaacatggcatgataggtgggtgggggatagaggttagtaatggatagaggaccatttccgagtgaagtctcctcagaagcaaaagcattgaagtcagaaacacaaatatccagtacattatagccaatagtcaaatgatgggactagatctggtaactggtgatgatgtcatatagtgggcagtagtgctgggatggctggggtcagggccacatggcaggggcctcaaataaaatgtgaaggagttagaaatttattctgttggcatgagaaagtgttaaagcttttgaatatagaatgatatgtgtaactttgagtttttaggaagataattctagtggcaaagttgaggataaaggcaaaagggaaaccagatgaaataatggggcactgtagtaggacagtgttggtaagtttgaggaaaaaaggagtaagagatatttttaaggaaattcatagggtttgagtataaattagaaggcaagtacaagggaataagcgtggtctttagaatcagacaaattagggtttgaatcttaaccttgcatttactaaaggactgaaagctagttccctaagagaaaaattttctcttttgtaagatgcttattctataaacatttgcaagcactggaagtataaaagcaaatgatacacatgttctcttgaagtctggtctagtctgtaagaagaggctgcactggcaggttttgaccaaattgtgtagaatctcatctgacgtgattgggagctttggctttattctggaagcaactaaaagcaatcaaaaaagactggggaataatgtgagaatgtagaaatgtaggggaatttctaaggatgaattggtagcaattggtaaacaatttgatatactgggaaagagagagactctttagaatatgactgagaatcttccaatttgagcagctggactgatagtgctaccatcattacctcacagggtttttcttagtgtgtcttgtaaatcttgcttgtccctcataaagaatggttttccttttcttcagactaaggactttttattacagtacacaacttaacaccccctgtatctctccatcacaacacttaactgtgcattgttattgcataattaattgtggtttttatttgtgcccatttccttcaccacatgagggcaagaaattatgtctagtttttctacctctgcatcttcatccacctagtaggcactcaaaatctagtagacagtttttgaattaatgattatgaagaatttgaaggctgaacaagtatcaacctacacagtggttagggcaaataaaaatgagggggagaaagtaatgaatggcaccaatttttttagtccttaaccaggacagtgagattaggcagagtgagttctttgggaaaataattgagtttgatattagatacgttgaatgtagatgttaatgagacatccaaatggatgtgtaccgttggtaatatgtagttgcaggcataccatgccagacataaggacttaaagatacagagttaggggtttgtaagcatagaggtgctatgggaatggatgacattgcgcagaaaattggtttaggttaagaaaagtggctattgacagaaacttggagagaggccatgtatgaggtaggaagatgaactagcagaagaccttattgcctttagagagatggaagaaaatgagtggatacaacattagggaagccagaggaggtgaggagtcattagcagtcttaaaagctacaaaaattaagtaggattaaggggccaaagcactgggaatatacagaaatgatggaaactttacaagaaaaatttcagtagatagaaaaatagcagctgagctagtggttttcacgtctttttggcagtaaaaggaaagaagataaagaaatggtactctgaggagctaatggagttgagggaattatgttgcaagtattatttgaaagcagtatttaaaactttttaagtcttaactgcagaatggactggaataaggagaaactaaagcaggaggacttaggaaaattgttgtagtagtcctttaattgtgaaatgtgtaaacggacaaaacttagacagttttaataagtagcattatccataaatataagacaccataaacatgatgcaaaggagaacagaagtgttgggtgttataataaaaagtgatagaaaaaaacagtttgtgaaattaagttttgaaacagctttagaaggaggtgaaggaaaaatagaaatgaataaaatgaaaattttagggaggtagatatagatcaacataggcatttattattagactatacttatttataagattattagactgagccctctgttgaagagataaagtaagagaactatgtctggtattaggattcttatggttaaattggcaagtgagtgtgcctaatatttgtagtgcttacagtttttgttattctgtatttttatagatttggtatatttcctccatgattatgtgttcctaactcataatttggaaggcagggcttcttaaaatgagatctgtgtgtcatgtgaagtatatgttaaaatgcaaattcatttctgcgttcttgggttggtctgaaaaaaattaaaaaaaaaattcatttacccctacttcatgcactgaatgaaaatctttgcgagtagagcccaagtagttgcatttttagatttccccaggtaattctattatagactgaagtttgaaagtcagtctctaaaaccttaaaagttggttaattttatttcaaaatgttttatatgcagtgtattcactttctaccatcaacctctaggacactggataggtttcttaacctttgagatttgctttctttatatgtaatgcagtacatgaaaggactttatttttgttccattgaggaatgttctgattgtatacaaacaagttaagaatttacagtgataatttaggggcttgctttaagcttcaggatttttttttaagagttaagttttgatatatattaagtggttgatttaataaattataattatcgtcgtatattgaagtcctgttttgtgccaggtaggcattatactataactttttaacgcattttctctgctacaataacctgacattggagactcaagggtcagagggtcggcccaaggctgctactctagaaagtggtagatgcccagatttgtacctaacatagccgatgcttagcatatagaatttaattaaaaacaaaattgctataggtatttgaaaggattagagggatatagtcaaatagttttcatatgtgtttagcccttttggagggaggatagagtaaataaatagaaggcactaagctttatggatgaatatgggaaatatggctttgcctgctgaaagcactcaggccacagggcctgcctacctatgctttcctcatcccggcaacagcagtaatttgtttcttgatacgtttttggatgttcataattatagaaaataaatttgcctttatgatgaaatttagtacctttttttttgaaagttcatccagttgtttatgtaaaaagaattgagtgaggtgttttatattttaggttaaaaatctgtaagagcctgattttagaattcaccagctcctcagaagtttggcgaaatatggtatgtttttgttttattttttggaattcgtattgcatgtgtatcttaatgtcataataatgacagatgtgttcagcaaatttgggcccctgccatttttaaagcattgtgtcaggtgctcactaactacacttccaagactgtatgagggacccaggtagggtgctgaaaaaatttacaagagattagtgtgctatgagaggtaaaataatatgcataaaaagattgagagggcaggtttggattttgggctatgagtattaataatagctttcatttgttgttgttgttgctgctgctgctgctgctgttgtttttgagacagagtcttgctctgttgcccaggctggagtgcagtggcaccttcttgactcactgcaacgtccatctcccaggttcaagtgattctcatgccttggcctcccaggtagctgggattacaggcgtgtgccaccacacctggctaagttttgtatttttagtagagacggggtttcaccgtgttggccaggctagtctcgaactcctggcctcaagtgatccacccgccttggcctcccaaagtgctgggattacaggcgttagccaccacgcccagccatttgtgagcacattatgtcaggcactgttctgagatacttagatgttagcttgtttatccatgacagctctatggaataggtactattatcctagttctacctataaggaaactgagactcggagaggttaagtaacttgcccaagatttctcagctagtgaatgaccaaacagagacataagtccagcctggccttggagccttttgagcaccggatctcataaaagaggggactggaagagaggacttgactctagttttcaaaatacatatagctctttaattacattgaggtcaattagtcaattaaaagatattttaactttattatttttgtgtttacaagatggaaagttagacttgtttgaatcttctaattccacataccattagtctcttgagaacccaaggggaagctgtatcatgaccacattgtttattttagggaaggtggtgtttcccatatgacctcagcaatgtctaagttcttattaggcaatgtatagttaggataggagtatctgggagattgcgttatttcttacagatactataaatcccatttattggaatcccctgcaattatttttatatattcaggccaatcctcacctaatctggattttgaagccctgcgttcatagctgcataggtatgggctcaaacattcatgttttaaccgttggtattcgcagataccttgctgttttatattgggttctgaatccacactggtaaccaccttttacgcttgactattgttgctttgaggatgttaattatgaaaggtttcttcctcctaatttcctcatctttccgtagttgatgcctcagatttggcctggataggggaatcgtgaggggaaagaactagttgcacaaaatgatcttttgatactgggatatttcagatgtatggtatctttgccagaactacagtgtcagtaaagaggcctgctaaatttgaactgtgacaatcagaaaagttcagctaaggccatgtaaggggttaaaaagatatttggttgagggaggaggatatgctttcatcttttgccatactttttcatgaaattaaatcttagtagatttatggccaagaaagagtagaatatatttttatgcagtacttaaggggttttgactgatgttttttattattattatactttaagttttagggtacatgtgcacaatgtgcaggttagttacatatgtatacatgtgccatgctggtgtgctgcacccattaactcgtcatttagcattaggtatatttcctaatgctatccctccccttccccccaccccacaacagtccccagagtgtgatgttccccttcctgtgtccatgtgttctcattgttcagttcccacctgtgagtgagaacatgcggtgactgatgttaaatgactttacgtacatacagaattagtgggactagactttgtgtttatgtgtgtgtgtttatgtgtatgtatataactattccattaagcagttgccctccttggtgactgattgctctatcagcttaggaatcttttgactgaatttgtccgtatttgaaagatctcaatctgtgttctgaatctttactcatttacatatacttaaatcttgaaacccagtatagcaaaactaagccaaaacaaacaaaaaaatccatcccttgataggaagtcagtatatctgggttttagtcagtccttcaacactagttccaaaatcttgggcaagtcagttaatcactcggaggctgcttaattttttttttttttaattcttagtatattatctgtcttgattaggtaaagccaaagttgttataagactcaaggtactattgaccaaaatgcttcagaaactataacattacataaaagtacaaggaattattacattttctcaaatgaagagatcatttaagaaaaacaaaatgctggaaaatagtccttaaaaacttttctataataattactcttctgatgaattttacattgacacctaatttgaagctttgaatattattttttgaacaatgaattgggtttatatattaaagtgttctaaccaaaggtttgtttaatttattagagttattaagcctacgctcagatcaaggtagcagctagactggtgtgacaacctgtttttaatcagtgactcaaagctgtgatcaccctgatgtcaccgaatggccacagcttgtaaaaggtaattttgaattattttacagcctttaaaaggctgtcattgtaaagtgaaatacatactgtaaaaatgaagacaatgtatagttggcaggaatactgctaagaatagtgggcctgagagttgacctacttcatttaatctccttaaaatattttagtgtctttttttctcattaaaaatatcagtagccactatcaaagacctatctgtatgtataaacaggaaagtatttctcaaaaaaacttcaaggttttaaacattttactataaacattatagaaaacattaaaaatttcttaatatgcattttaaagtatgccttttatgtggtgaacgttttaactaaacatttctctagaagtttttataacattaataaaactagtatacttttctctcctagagagttacagtggaggtaaaaggagtggcttgcaggatggagaagctgcaccagtgttattggaagtgagccaccatttgaatttgctagctcatgctgcagtattcagattagtgggtgttttgtgatcatattttctgcgattcaaatcaagacctaaaattgattctcattctgagatttacattttattatccaatgttatttggttattgtttcagttttaaaatttctgacttgttattctgacacactttaggataacctaagtcaatagtttaatacaaaaatttccctttggttatatgttttgaattaggttatatgttctgcatttacaagcacatacaggattcttacttccagcaacttggcagtaaaagaataagtagactctttaggagccaaagtcaagcttgggaactgttgctaggtggtatatatttcatagtttatgtttgtttccaagacaaggtctcactccatcgcccaggctggagtgcagtggcacgatcacagttcactgcaactttgaccttctgggctcaagtgaccctcccacctcagcctcccaagttgctgggactaaaggcacccaccaccacacccggctaagagacgaggtttcatcatgttgcccaggttgaccttgaactcctgagctcaagtggtccttatgtcttgacctcccaaagtgctgagattacagacatgaactaccacacctggcatatgtcatagttttgagagtttgaattctaacctcgggactttggtaacttatttataatattctagaaatatactgttattaggatgagtagaaattcattcagacagaaactattataaattactgcaagaaaaatgtctgctagttctgcatatattcatttttctcttgattaaaaaacaatttccaatttgagtagaacaactttgctatgtttaatagacccaggacagatttattttaaggtaataatctttcaatccttcttcttctatactggattggtttaaattacttagcttgtcttatcaatggtttttaatagcctactttaatatatgtaaaaagtagtaattaatatgttacagtttggtggcaaacattttgatgccaaagttcacatattctcttgcttagggaacagaaattgggaagatagatgtagttatcatttgataatgtatttaaactctatcccatttcaggatctcaaaactttgtaacagttacatattgtacttctaagacttagatttgtttttcttcttgtgtcttacctttttgcagtaatatttttattttcctatcatcatgtcctcattttttccctctcttctctttccctgttaattttgaaagttttgctgcctacgtgtttgaaaacttctaatctgcctctcttccctcagtgccagcaggtttattttttgttttgcaagccagctctgcctccttacagtatgacatctgatgctggagggtcgcactttcaaaaatgagtcagctggtacatggggttatcatcaatttttagctcttctgtctgggagatacaagtttggaagcaatcttggggtacttacccacaaggctggtggagaccaggtgtgtcacataggtgatttgcttgctccctgggggagagggtggagtgaaatttttgcatttgtgtcacagccaagtcactgccacctccagcatgccccagtttttagttgttatgtaattttgtgcaaaattgaaaatttaaatacattgcaaagaagatctaaaataaatatttgagctgctggagtcttttttttttttttttttccttttccattcttgtccttggaatctgaatgaattgcagtgagggtaattttgagagtctgataaagaagtgaggggttgttttttgtttttgtttttgtttttagctaagaaatttagaaaacaggtttgtgtgtgtgcgtgtgtgtgtgtgtgtgtgtgtgtgtgactgattttaagattcttgttagagttgcttaaagttggaagcctaaagtcagtgagaagttcacaaatcaggactttgtaatgccaatttgaaaatttagcttttgacctcaaaaaacattttttatctagtttgggaatttctaagtgttagaaatcaatattatattgactcattcattgttgctgatgctgtttataaaagtgaatagatagggaaatactgattcatatctcgtgaaatgaaaatgaaaggctttttagtgacttagaattttaaatatttctacatgagagagcagtagtatatttagaaataacaaagtaactggcaactgtttaaaactgaagttaattcacagctatccagtgcaaaacttcacctcaggtgatacacttttgacaggtaatacatacagtaagtgtatttttagggaaacagtttcattgttgaaccaagataatcatcattagaatgttgtatctgatttaagtgtctttaaacttaccaaggtattagattttagtttgaattgtctggagtagcggtagcggttggcacatttgttcttaaagggccagaaaataaatattttaggctttatgggccatgtggtttctgccacaagtcctcagctctgttcttttagtgtgaaagcagccatagatgatacctaaatgaatgagtatggctgcatcccaataaaacttcatttacaaaactacatggctggcctaagctttagtctgtctgcctagggagtagtttactgagccactaatctaaagtttaatactgtgagtgaataccagtgagtacctttgttaatgtggataaccaatacttggctataggaagttttttagttgtgtgttttattacacgtatttgactttgtgaataattatggcttataatggcttgtctgttggtatctatgtatagcgtttacagtttcctttaaaaaacatgcattgagttttttaatagtccaacccttaaaataaatgtgttgtatggccacctgatctgaccactttctttcatgttgacatctttaattttaaaactgttttatttagtgcttaaatcttgtttacaaaattgtcttcctaagtaatatgtctacctttttttttggaatatggaatattttgctaactgtttctcaattgcattttacagatcaggagaacctcagtctgacgacattgaagctagccgaatgtaagtgtaacttggttgagactgtggttcttattttgagttgccctagactgctttaaattacgtcacattatttggaaataatttctggttaaaagaaaggaatcatttagcagtaaatgggagataggaacatacctactttttttcctatcagataactctaaacctcggtaacagtttactaggtttctactactagatagataaatgcacacgcctaaattcttagtctttttgcttccctggtagcagttgtagggaaatagggaggttgaggaaagagttgagtttaacagtctcaacgcctaccatatttaaggcatcaagtactatgttatagatacagagatgcgtaataattagttttcaccctacagaaatttatattatactcaagagtgaaagatgcagaagcaaataatttcagtcactgaggtagaatggtatccaaaatacaatagtaacatgaaggagtactggagtacccaggtatgcaataggaatctagtgtagatggcagggaagtaagagtggccaggaaatgctaagttcagtcttgaaatgtgactgggaatcaggcagctagaagcatgagcggcttattccaggcagaagtatgagccaaagttagaagcagcatagggagtaggggacaataggcagttgaggacttttagatcataaactagctgagaggtaggaaaatgaagaagataagatgtgatagaaggtattagggagtcagcaaagaatttgctcagtaggtagatagtaagtttgtcaaacgtgtatttttaataaccttgcaagagagaaaggattgaagagaaacgtgtggtggtaaggtagttcagtcagtgagagccttgacaatgacagtggtataataggaattcaaaataaatttttctggatttaagacaaatatttaggacatgaagtaagtaagactttagtgatttattgtgaagactaaagatgtttcagataatagaggtagtaattatcaaagcaaagtttttcgaggtattaagggttggaatgaaaaatacaggtgtatctctcatacaggtaatataaaaaaagaaaaatgcagatatagtgattgaccttgaataagaggaaagatgcccatctaatgaaattagaacaaggaagtaaagatggatgtgtgatattaattgtaattgtgggtgagggtggaaaaatcaagatttttttactgaaaatattggaaccttatttaaatgccggtatatattgtgaatctgcaagaaacgactataaaatgtatttctcaaatttatgtgacccaaccatgtgacttgtcttttaagctttaaaaaattgtagtaaaatacacataatgtaaaattttccatttcaccatttttaagtatttggctcaatggtattaagtatattaatattgttgcacagtcacgatcagaactctctgttttgcagaactgaaactctgtacccattaaacaataattcctcatttccttatcttcacagcctctgacaaccattattctactttgtgtctaattttgactgctctaagtaccccctataagtgcaatcatacagtttttgcccttttatgattggcttattttacttcgcagtgtcatcaagtttcatccatctttagcatgtttcaaaatttgcatcctttttcaggctgaataatgttttattgtatgtatataccacattttgcttatccatttacctgttgatgagcgctcaggttgcttccatgttgtagctattacagataatgttgctatgaacaggagtgtacaaatatctttttgagaccctgctttgaattgttttcccagaagtggaattgttggatcatatggtaattttatttttaaaattttgagaaactgccatactcttccagagcaactgtacctatttgcgtttctaccactagtgcacaaggggtccagtttctctacatccttgccatcacatattgtgtgagagtgtgtgtgtgtgtgtacttcaatagtagtcattgtagtggatataaggtagtatgttactgtaggttagtgaccacgaaactttttatgaaacattttttaataatattttgtggaatacaaggtttgtttagaggttttgagaagactgaaaacttaggaagctactgaggggaatgggtgaagaagtggatcagaagttgagagtcttgactggctggctacctgaaatcagaaaccgtatcagagtaggagaatctcattccactgagtgactagttaagattaaagactttatcacatttgaaatttaaagacttttctccaatagccagaagattatgcatggtattttagggttggatattagcagagctgatggaacagaatcattagtggcatgtgcataagatgttaacattggagtatttgaatttatatgctgtggatgatggccatgattggaaaggttgggatgccagaccaaagtgttgagttgttttaagaaaagcctgaggtctagataacagcaagatggcagactagcactttgcagcactcatctcattgtagaaccatcaatttgaacaactgtctacacacaaaaatataagagctaagaaaccagacgagagattacctgaatgtggcacacagataagaaaagacacattgaaaagggtaagaaggacagttttacattacttgtgtcacacctccctcagtccctgagatcccagcatggagagagagactgttcacctgggggaaggaggggaagtgtacaccagacttagaccctaacattgagctcgccccagtaaaactcaatgctaggcaggcccccatggccccaaacttcaggccaatacccacaaaccaagcttggaggcccaccccagcaccaagctggatcccacagccctaggctctaagcctgtctagtgctagggtggtccctgcagccctgccctctagatcggcccctgtggcctcacatcactgcagaacaagggtccaaacccagtacttggccagccccttgtgatccaaattctaggccaacatccacctacccagccttcacactggtccttgcagatccaaggttcaggctcactctagtagaccaggatgccaggccagcagcacctgtgtaccaaggctccaggacctaccctgctgacccagactccaggccagccccggtagactcaggctgcataatctctggacaggctgactggtgaagggctttacccaataaagtcactctgcaaagactggaacaagtctcagcttcttcaaatgtgcaggtgccaacacatgactacagggatcaagaacagtcagggaaacgtgacaccagtcaaaggaacacaataaggcacctgaaccaaccataaagaaatggagatatatgaactgcctgacaaagaattcaaagtaattgtttaaggaagctcaatgaatttcaagaaaatgcagataaacaattcaacaaaatcaggaaaacagcaatcaaaatgagaaattttgagattgaaattattttttaacaaattctgaagctgaaaatgcaataaatggaatgaaaaatgcaaaagagcattaaaagcagaattgagcaagcagacaaaagaatctgaactcaaaagacaggttatttggctagactaaggaaaaaagagatgactcaagataaaaaaaataaagagttgtgttttttgatgataaaagcaacaagtctttagctagactaagaaaaaaagagatgactcaagttaaatcagaaatgaaagaggaaccattgcagctgataccagagaagtacaagaaataagaggatcataagagactgaacaattatatgccaacaaattgattaccatagaagaaatggataaattcctagacacatgcaacttgtccaagcttaatcatgaaatgaaaaatgtgaacagtccagtgacaaggattgtatcagtcataaaaatatctcccaccaaaggaagcccaagacttggtgactttactgctgaattctagcagacatttaaagaagaactagtacagattgttctcataattttatgagaaatttaagaagagggagtaatttcaaactcattttgggagatgagcattacctagataccaaagccagacaagaactctccaggaaaagaaaattacagacccgtattcttaatttagatgcagaaattctgaagaaaataataactaaattcaacagtgtattagaaggatcatttactgtgatcatatgggatttacctcaagggtacaaggattatccaacagacctgaatccataaaatgtgatatacaacattaggagaacaaaggccaaaaccatgttatcatttcaatagataattgagataattgagaaaaagcatttgacagaattcagtattctcttgtgctacaaaattttaaaaaattaagtatagaaggaatgtacctctataaaataaaggccatattgacaaacacactgctaacgttatactgaatgttgaaaagttaaaagcttttcttttgagatcaggaagaaaacgagaatgcccacttttgccatttctattcagcacagtaccggaagtccttgcaagagcaattaggcaagagaaagaaaaggcatcccagtaggaaaggaagacattgttgtccctgtttgaagatgacatgatcttgtatatagaaaaacctaaagactccaccagagaattgttagaactgataaattcagtaaagttgtaagatataaaatcaagatacaaaaatccgtagaatttctgtacattaatgacaaattatctaaaagaaaaatcaagaagacaattccatgtataataggtaccaaaaacaaaacatgcagtggctcccagtatcagtggttctgcatttgcaaattgaaccaacatttggatgaaaatatttgagaaaaaaatacaacaataaaaatactgttttcttatacaataaggaaactacagtatagcaactatttacatagcatttacgttgtattaggtactaagtaatgatttaaagtatacacgaggatgtgtgtaggttgtatgcaaatactataccattttatataatggacttgagcatccatggattttggtatctacaggagatcctggaaccaatatcctgcagataccgagggatgattgtacttagaaataactttaaccaaagagttgaaaactatgtaacattgattaaagaaattgaagatgatacaaataatggaaagttatcttgtgtttatggattggaagaattaatattgtaaaatgtttttattatccaaagcaatctgcagttttaatgcaatcctgatcaaaattccaatgttaaatttcacagaactagaaaacagtgctaaaatttatatggaaccacataagatcctaaatagccaaagctgtcatgagtgaaaagaacaaagctggagacatcacactatctgatttcaaaatatagttcaaagctacagtaattataacagcatgatagtcacatagaagtagacaggccaggcacagttgctcacacgtgtattcccacactctgggagactgaggcagaaggattacttgaaaccaggagttcgagagcagcctgggcaacatagtgagaccctgtctctaaaattaaaaaaaaaaaaaatttttaaagccaggcgcggtgctgtgtatctgtagtcctagctacccgagaggctgaagaaggaggattgcttgagctcaggagcttaaggtggcagtgaactgtgattgcatcactgcactccagcctggatgacagcgtgagaccctgtcttttaaaaacaaaagaaacaaaaaaacagacacatcgacccacaaaacagaatggagagcacagaaataaattcgtgtactatcagttgattttggacagggtgcaaagaacacagcggggaaagggaagtctgttcaataggtggtgttgggaaaatggaatatctacatgcatgagaatgaaatcagacctgtatctcacatcatataccaaattcaagttaaaatggattaaggtcttaaatataagacctgaaactgtagaactaccagaataaagtataggagaaatgtacatgacattggtttggacagtgatttttttggatatgaccccctcgaagcacaggcaacaaaaataaaaattgatgaatgagatcacatcaaactaaaaagcttctgcatggcaaaaagaaaaaatctacagaatgaaaaaactcacagaatggaagatagtatttccaaaccatatatctggtaaggggttaatatgcaaaatatataaggaactcagacatctcaatagtaagaaagcacctcacttaagaaatgggcaaaggacttgaatagacatttctcaaaataagacatacaaatggccattagaatggctattaaagtatgatgaggatttgcagacaagagatatattgcgcatggcaggaatgtaaattagtacagcatttatggaaaatagcatgacgtttgctcagaaattaaaaaatagaactaccatatgattcagcagtcacacttggatatatatgtatttttatatatatatatatatatatatatatatatatatatatatataaataaaagaataaaatcagtgcgctgaagagatctgtactcccatgttcctttcggtatcatttgcaatacccatgatacagcatcagcctaagtgttcatggataaagaaaatgtggtatgtatacacagtggaatatacttcagccataaaaaggaggaaatgctgtcatttgtgacagcagggatgaacctggagggcattgttgaaagtaagccagccacagaaaggcaaatactacatctctcttaaatgtggaatcttaactcagggatgtaaaatggtggttaccaggggctgggggtgagtggactgggttgcagaggtgttggtcagaggacacaaaatttcaattaagaggaatttgttcaaggtatctattgtacaacatggaaactagttaataacagtgtatttttggaaatcactgagagtagattttaaatgttctgccataaaatataagtatgtgaggtattgcatgtattaattagcttgatctagccattccacagtgtatacatattttggaacatcatgtgaatacaataaatatgtatccttttttttgttttttgtgttttttttttttttttttttttttgagacagagtcttgctttgtcacccaggctggagtgtagtagcatgatcttggccactgcatcctctgcttcctgggttcaaatgattctcctgcctcagcctcccaaatacgtatcatttttatttgtcaccaaacctggtgtcttgacaggtgaaaggagatatgagtatgagtgaaactcttacaaagatagctgagatgatcattgtcagaggttttagtatgtctaacaaagacaagggagtgatttgctgaaatgaggaggtgaagatgtctcaaatttagaaaggcaaatattttgggggcctagagtattgggatagaaccatgtacagggacattgaagtcactttgctgatgatgtaactgggggcaaagtggaggcttaaatatgtgggtttaattgaccagaacagggagggaaagagaaggcattcggttagatgacatgagtttcaaattacaagctgtttttttgttgtttttaatacagggaattttgccgtttatttttaatacagggaattagaagaataatggtggacttaggagttttaggagtcacataaaagggttgcatgataggcagtgcctttggggaggagccaggctttcatgaaagctaagaagttgaggggccattatgtaaagtagttgaagatgggggatagcctatgggtcttcagaaagcctctgggtttctagagatctttctggaagaggttaggaggatgagtcaagtttagaatggaagaggatagatgaagcttgcatttggtagtaaaaaccaaggatgaatgtgtgaggcatgattatttgtcacaagtttccaggtgacactctggcactcagtccttgttgaattaagcaagctttcttactgttttacttggctgtgttaaagtagagtaacaggaaattagacttcccataatgtctcaatagagctgttttaagtttctagccataattggtatgggaatatagctctaaaccttcaaggctgctaccatttctcacattcctatatctagaaactgtagccaggcagcactttcagtgaggtgagtgggtccaggtttgttcaattacttttgtaccaacctaataccttaatagtatttgtcctaatttacaaaaataggtaatgaaggattcttggttttacctcagagctaactgtccattaatggcaacatcccacatttgttgaagcatgattttgttgtttgtactttgacatgcatttgatattttaagtaacgccttgaatgcatcttaaataataatttatatacagttaacactcctgtttgtttttaggaattcttagtgttgccaatttcctaggatgtagaagagcatagtaaaaaaaaaaattattaatactcttaaacaagtgtttttaacaactggacaccattttgtagttaagcctagaaacagaactaatgcaataacccagatcttttcatttattcgtatgtttattttacctggatttactttagttttttgttttgtttgcttgttgtttgagatattgtcttgctctgtcataagtgatacagctagagtgcagtggtgtgatcagagctcactacaactttgaattcctgggctcaagtgatcctcatgcctcagcctcctgagtagctgggactacaggcatgtgccaccatgccaggctaaaacagtgtttttgtttgtttgtttgttttttgtagagacagggtctcactatgttgcccaggctggtcttgaactcttggccccaaagtaatccttctgccttggcctcacaaagtgctgggactacagacgtgagccaccgtgcctggccatggattttgtttaaatttataaataccgtgttgtagaatctctttgtatgtattaatttagacaccttagttttcttaatgatttcataccagtttctcagtaacttcagattttttttttgagatggaatcttgctctgtcacccaggctggagtgcagtggcgcaatttggctcactgcaacccctgcctcccaggatgaagcaattctcctgcctcagccacccgagtagctgagattacaggcatgtgccaccatgcctggctaattttgtatttttagtagagacagagtttcaccatattggccaggctggtcttgaactcctgacctcgtgatctgcctgcctcggccttccagagcgctgggattacaggcttgagccaccgcacccaaccagatcagattttttatgtttggtatttactctttacctctaacactaaggctatgtttccagatgtataactataaatggagcaggggtaaatacaacaagtgatttatggttcagtaaagcaagttagttttaataaatgctcagtttactgtaaatgtcagaaatgccccaggactctgtctattgacaactcttctatttccatcgtcagctcttgccctctgaactgtagactgatttatccaacagttaagtctggttctcaaacttaacctgtcctaagtggagctcctgattttcatcatcccaaacctacgtctctcataatattttgccatctcagtcaataacagcttttttcccctcctgtgcagccagaagccttggaagcatcttttaatttctctatgtcacatactcaaattattggtaaatcttgttggctacaccttccaaatacccataattcattttattttttttaaccattatacttctgtttactctgtttaaaggcatcatcttttggcaaaagaaagaaattgtttcccaggagtcttgtgctttacagtgtattctctagtagcagccggaatgatctttttaaaatctgagttaaaccatgttatttactatgcacagaacttttcagaggcttcccatcttaaaagtaaaatctggagatttacatggccctgtgtgaactggcttcctttcatttctgtgatctctctaccgcacttgctcatctctgtctaaaatggctgtatctttgtcatcttaaggcttgtaactattgtctgtgaccctgtgacccttctctgtgataatccatgtggcttccttcctcacttgattcagagagctctctgctcaaatgatgcttttcctgaccggctgcatcaaagaatgatcatgttcttctgcattccccttaacttgctgcatttttcttcatgggatttaatgtcatttgacttcttgcatattgatttctttgttgttttgcttctttaccactagaatggaagcctaatgacagtgcctggcatacagtaggtagtcagtaactacttcctacatgaaagaatgaagctagtaaatttatgcaaaatgtttgtttctgcctttttaattatcttgcagaaatgtaggaagaattttttaggatcagtttatgtatatatataaactgataagtatgtacacagcctgtagaatgtgggtaataccacctatcatctttttgagcatttaccatgtagcaagtgactgtgctccataatccacatgcattatcttgaatttgataggagagctgagctttttaatcagagtagaccatagaaatatagcttggatgcttttatttcctatatgacttcttcggtgtacttacacatctataagcatttatgggtcaagtaacatactgaaatattttctgaagtaaaagaaatctctttaatcaaataagtggttctcctataggttctcatatcatattcttggtctccagattgagaaggtccttttgtatgcttccagtatactcgaaaccaggaggtagtctgacatctatttcccttcaaggtcaaataattagagaaaggtttaattgacactgttatcgagacagtatcagaagagaaattgaaaaatctctgttgagactctgtaatttgctaggttctgaggatacgacagtaaataagttattaggtcatatacctcagcttcccatttaattaataggcagttattatatataatagaataggtactggttggtatgagactacagaggaagaatacctaattatcttaaaagtggtatataagctgaaaccttgaggatgcttgggaatagctaagaatcatagtgttctaggcaggaagaataacacctggaatcagagaagacagcagaacaagtccactgagtagtaagaagttccgtattgcagtaatgtagagttagctgatgggagaaggtgtgaaaaaatgcatttggatatagaaagccaggagcacgctaaggccctttgctttcttctgacagacacaggagcccatgaaaggcatcacgtgtggaaggaagtgacacgagtcatagtctgccctgcttttctaccacctgaagcatcatataaacctatatcttctgtttcaaatgtaaggaaacatacttctagttcacagtagggatagttgaatggatgaactgtttctggctgaatcttctcaaagtagaatgagcaaaacatggctatattatgagattatctaaggaaagatttttataatcatgtgaattttgaatttctttatatcttaattattccaagagatttttgggaacattaatgagaatagtttacctttagtacatagaacttcttgtcagctataaatgaggatcaaacccaaaagagattaacaaaaataaaagggatgctatttccccaaattagcagaactttttgattcaccgagttctttgttttttaactgctgtctgcctcttaacataattgagtattcagtgatataatataaataaatcacttactaaatgctgatgaacgcttgtttttactaacatctcagcttgtagcatatcttgttgcccataccagaaaccctacccattacctctggctcttccagcttatttacctcttacaaactacttattttaaatatttcctgggtcaatttcatctttttttttcttcctactgctacattatttgtccggactattacagtagtcattacctaactggattgcttgcctccagttttgcccactttggtttcagttattgaaaaggcaaattttgtcagtcacttaacctgcttaaaacccttcagtgactccttgtgttttagttcttatctaatggtttatgaatgtagtgggttacgaatcttccggaagagtgcatttgcactcctgaagtgtgcatgtatttttatgaggagaagatctttagcttttattagattactcctcttttggctaaaaaaagaattacttatcatggctattgaggtcttccatgatctggcttttccctgcctctccattttcatatttttgaaacttttcttgaactttaggctcttgaagtgcttggaattgtcttataatatcatgttttcaggcccctgtgcttttactcattttcctctatctgaaacattcttcccctgtctgaaacattcttcccacccatagtgtcatcagctcctagtcatcttttgtgattcacctctcctaagttgcctctctttttattgctattcctctgtagtcatctctgtgatattgaaatcgtggctttctctttctttagacatcataattccttgaagagccctttttatgtagcctgacaagcagaatttatactgaagtagacatttggaagtcatttagttattgctcaatccttgaaagatgaaactgtccaaagggaaatttaaaagggaaagtatctaatagctgatccctggagaatacaaatgtctctagatttggaagggaagtctctgaaaaacagccagagagaagggaggaaaccaagaaatagtgtcctagacccaaaagtcaataatttccaaaaggtctatatttcttaggaaggccaagtaaaataagtagtgaaaagtgatgacctgactagagcagattcttcatttccagttacagaagctaggttataggtacagtaagctctggacatgttcttttcccacatggaacgttattcgtgttctccactgctgctttgaactattccttttactctctcagcataaaaatccctgctcctttgaagcttatgccttctggttttgtcttcctctgtctgccttcagtgagctatcagtttcttctcggtttttgaggactgctacctgaacttattcttcttcactctttcccaaatctgctgccatctttatttatatgattaacccctcagtccctagcaagtcaaattcccatccgtttttatctacagtaatgttcacctctgcatcactgctgcttcccatgtctacaggcatgccaactcaaaactgttttaccccaaaagcttcagtgaaaacaccttacctcaggttgccgtctttgaatgcttttctactatcttaaacttgttttctttcattgcgccttttcttccttctcttagagacttgtcctatggctcttctactgtcttccagctacaattccctcttgttcctgacatgtactgctcagagccaggagatggataagtagtagtatttcacatgcacttttttctctggggagcagtagtcatacaataattgattaagataaaacaggtttttatcagtttatataagaggtaaagaaaacaatggggtagagttttaaaaattgtcaaaaacaacacattttaccatattaatgatttgaagtgtacggtacaattgtggtaactgtgcacattgttgtgcagcagatctctagaactttttcatcttgtaaaacagaaactctacattcattgaacaactcttcttttcccccttcttcctattccttggcaaatgccattctactttttgcctctaaaatttgactgttttggctacttcatgtcagtggaatcattaagtatttgtcttttgttgactggcctatttcacatagcaatgtcctcaaggttcatttgtgttgtagcatattacagaatttctttcttttcttttaggctgaataacattttgttatatatgtataccacattttctttaaccatttgttgatggatgtttaggttccttccacttcttgaatattgtaatgttgaaataaacatgggtatacaaatatttttttgagaacctgtttttaatatatttggaagtatacccaggtgtaggattactggatcatatgtattctatttttttttagattttttttttttttacaggagttctaggttcacagaattgagaggaaggtacagagatttcccctgtacctccttccacacacatgtatggattctctcatagccagtgtgcatctcccaccagagtggtacatgtctttctgatgaacctatattgatacatcataattacccaaagtccgtagtttatattagggatcattcttagtgctgtacgttctgtggctttgaacaaagtacaatgacatgtatctaccattatatcatacagaatgttttcactgccccaaaatcctctgtgttctgcctatttatctttccttccctcccactccttggcaatcaccgatccttttactgtgtctctaactttgccttttccagcatattatatacttgtaatcatacagtatatagccctttcagcttgactatttttacttactaatatgcattaaagtttcttccatgtcttttcataggttgttagtacctctctttttccattttctggacatatcacagtttgtgaatgaatattcacctaatgaaggacattgtggttgcttccacattttgctaattatgaataaaactgctgtagatatcggtgtgcaggtttttgtgtggacttaggttttcagcgactttctgtaaatactagggagtgcaattgctggatcttatggtaaaagtgtttagttttgtaggaaacatccaaactgtcttctaatatgacgctatccttttacatttttcaccagcaatgagtgagtgtttcttttgctctacatcttcaccagtatttggtgttatcagtgttctgaattttgtccattctgataggtgtgtagaggtatcttataattttaatttgtgtttctctgatgccatatgatgtgtgggacatcttttcatatgctgaattgccatctgtatatctttggtgaggtgtctgttaaggttgttggccaattttttaattgggttgtttgttttcttgtggaattttaagagttccttacactgtctctgtctgtcttgtctgtctgtctgtctgtctgttgagacagagcctcgctctgtcacccaggttgcagtacagtggcacagtcttggctccctgcaacctctgccacctgggttcaagtgattctcctgcgtcagcctcccgagtagctgggattatacccgtgcaccaccacacctggctaatttttgtatttttagtagacacggggtttcactatgttagccaggctggtctcgacctcctgacctcaggtgatccacccaccttggcctcccaaagtgctgggatgtgagccaccacacccagcctccttacacattttagttaatagttctttatcagatgtgtcttatgtaaatatttcctccctatctgtggcttgtcttttcatactcttgacattgtcttttgcaaaagacaacaatttttaagaaacaagtagacaattttaatgaagtctggcttatcagttcttttcttcatggttggtacctttggtgccgtatctaaaagtcatcaccaaacccaagatctagattttttcttatgttatcctctaggagttttatagttttgagttttacatttaattctctggtttattttgagtttatttttgtgaagggtgtaagacctgtgtctagactctttttttttttgcatgtggatgttcagttattaccactgtttattgaaaaagactattttcttcattgtattgcctttgcctctttgtcaaatactgccattgctcctttgactatgtgggtccatttctgggctctctattctgtttcgttggtctgttttgtcagttcttttgtcagtaccacaccatcttgactactgtagctttacagtaaatcttgaaatcagtagtgtccatctgactttttctgtcaatattgagttgtctctcacgggtcatggaatagctcttcattatttagttatttgatttctttcatcagagttctaaaacatttttcctcatatatcttgtactaattttgttagatctgtacttaaatatttcattttgggacacgctaatgtaaaatggtattgtgtttttaatttcaaattcaacttatgcattgctggtttacaggaaagctattaacttttttatatgaaccttgtatcctgcagctttgctataatcacttattagttctaggaggtttttgttgtttttctttttctttttttcaattcctgtctatgttctacacatatagtcatttcatctgcaaacaaaggcagttgtatttttttgttccccgttagtataccctttatttccttttcttgtcttagctaggacttccagtatggagtggtgaggtggggatattcttttcttgttcctgatcttagtaagaaagtttctagtttctcatcattaaggatggtgttagctgtatgttttttgtaaacgttctttatcaagttgaaggtgttccctctattcctagtttactagtttctatcatgagtgggtgttaaattttgtcacatacttctctccatctatggtatggtcatgtgatttttcttctttagtctgttgatatggtgaattgcattaattgattttccaatattgaaccagtcttgcatacctgggataaatcctactttgtgctggtgtatacttctttttatacattgtagtaaaatttagtttgctaatactttgctaatacaaagatttttgcatctttgttcatgacaaatatgggtctgtagttttcttttctgataatgtctttgtctggtttgggtattagagtaatgctgacttcatacaatgagataggagcatctcctttgcttctgtcttctgaaggagattgtagagaactggtgtggtttcttccttaaatgtttagtagaattcatcagagaatccatctgggcctgatgccttctcttttagaacattattaattatggatttaatttctttaatatatgctttttaatcaagattatttcttcttagagttctaatagattgtgtcttttaaggaattgattcatttcatctaggttaccaaattcgtggccgtaaagttgttcataatatcccttgattatccttttaatgtccatgagatctgtaatgatgtccactcttttcattctgatattagttattttgtcctttgtctctttttcttagcctggctagaggcttattgattttattgatcttttcagagaactagttgatttctttgatttttctctattgatatcttgttttcaatttcattgatttctgctctaatttttattacttctatttggatttaatttgctttttctagtttcataagttggtagctcagataattgatttttagatcattcttttcttttcttttttttttgagatggagtctcgctttgtcgcccaggctggagtgcagtggctcgatctcggctcaccgcaagctccgcctcccgggttcacgccattctcttgcctcagcctcccaagtagctgggactacaggcgcctgccaccacgtgtggctaatttttttgtatttttagtagagacggggtttcactgtgttagccaggatggtcttgatctcctgaccatgtgatccacccgcctcagcctcccaaagtgctgggattacaggcgtgagccacagcgcccggcctagataattcttttctaataaatgcatcagtgttgtatgtttctttctaagcgctgctttcactgtatcccacaaatttggataagttgtgttttcatgatattttcaatttataatggtattgggacacaacccaataagtaagtttaggagcatttgtatgcataagcacaattgttgacattattttgaacaaattcttatttgttagatcaattaagtataagaaaaataaaaggttttattttactttcagtgtttccttcttttgatgctctatatatgtagatttcagtttctgaacttcccaacacttattgcaaggcaggtgtactgacaacaaatttccttaatttttgtctgagaaagtgtttctttttaacttttgaataataatctcacaaggtagagtgctaggtttatggtttttttttctctcaacactatgaatatttcactctttttcttgttggaagtcacatgtattttttcttttttttctttttttcctctacaggtaaggtgattttttccctctggcttacttcggatttttttcttatccttgaatttctgtaattacaacgttttatgcccagatgtagttttttggcatattttcaagctcagagattcttcatccatgcccagcctactaataagcccatcaaaggcattcttcatttctcttacagtgttctgttttttgtttttgtttgtgttttatctctagcacttccttttggttcttaggattttcatctctacttttttaacatgttgtttactcagttcgttagggcccttagcatattaatcatagttgttttagattccaagtttgataattccaaatccctgctgtatctggtcctggtgcttgttttttaccttttattatgccctgtaatttttttcttgatagcttggacatgatgtactaggtaaaaggaactgttgtaaatgagcatttagtaatgtggttgtaaggtgtagggagaggagaagagttctgtagtcttatgattaggtcagtctttttagtgagcttatgcctctggactgtgaacttcacaagtgtttctcaatcccacccctccctcattcccttagttagaacaagatagctataatggcctgaagttgggttatttctcttcccccacatcattttggctttgctacaaccccagcaggttaggctctggttaactagtttctcctgaggacaaaccttgttaagactggaatagtctagtgtacttgaaaatcatttctctttgcctcccctgctgagggttgaggatttttctcctatatttactgtgagaagctggtcaattgcctggatgtaaaacttagaaaattgtagggctccccctataattgggtaactctggagtttttagctttcagagttgtccacactgagccttcatcaatttgtctattacacttcaggatttcctaccccgtggaggtttctgcttgtgtttttcatctcagataaatggtgatgctatgtgttcacctgttctctgctctcacaggcagtcatttgccctgtgacctcacttatcctatctcagatttgtttatttttaagtttgtcattttttacttgttgttaggatggagtggtgacttccaagctcttcatatgtggaactggaggtaattctatttcaaattttttgagggaccttcatgttgttttccacagtgcctggcaccattttacattttcaccagtggtgcataagggttccagtttctccatatcttcaccaatacttattttctgtttttttaatggtggccatcctaatggtttcagatgatgtatcattgcagttttaattgacatttctccctactgatcagtgatggtgagaatcttttcatgggcttattgcccatttgtatatattctttggaaaaatgactattcaagtcctttgtccactttttaactagattttttgttgttgaattgtaggagttatttatatattctggatattaaccaaataacagatacatggtatagaaatattttctcctgttttgtaggttgccattttactccatttactgtttgctttgtagaaatttttgagtttatgtatccccagtttgtctatttttgctttggttgcttgtgcttttggtgatctattcaagaaatcattgccaagtccaatgtcatgaagctttttctccatgttttcttgtagtagttttataattcgatgttttaagtttaggtctgtaatccagcttgagttcatctttgtatatggtgtgagataaggctccaacttcattcttttgcatgttagattccagatttcccaatacagtttgttgaagaacctcttttccctatttctgtgttctctcttctgctcacttggtctgtatatctgtctttatgccagcaccatagtgttttgattactatagctttgcaatatctttagaaatcagggaatgtgaggcctctagctttgttttttgtccagattgttacggctattcagggtccttcaagattctgtattaattttaagattttttttttctgtttctgtagaaaatgccattgggattttgatagggattgctttgaatttgcagattgctttgggtagtattgccatcttaacagtactaaatcttccaattcataaacttggatgtctttccatttatttgtattgtctttaatttctttcagcattgttgtataattttctttttcttttttttttttttttgagacagagtctcactctgtcaccaggctggagtagagtggcgtgatcttggctcactgcacctctgcctcccaaattcaagtgacaactcctgcctcagcctcccgagtggctgggattacaggcgcgcgccaccaagcccagctaatttattttgtatttttagtagagacagggtttcaccatgttggccaggatggtctcaatctcttgacctcgtgatcagcccaccttggcctcccaaactgctggggttacaggcgtgagccaccacgtccggcctatgttgtttaattttcaatgtacatgtctttcatttgcttggtgaaaatattccctaagtattttttactctttgatttcattttaaatgggtttaaaaaattaatttcctttttggattcttcatttttagtatttagaaatgcaactcttttcttaatattggtttttatatcctgtaactttactgaattcctttattctaacggttttttttctttttggtaggctagagttttcaacataaaagatcatgtcatttgctaacagaagtaattttacttcttacttttctcatttaatacctttcatttctttttcttgcccagttgctaactctggcaggatgtctaacagtatgttgaatagaagtggtgaatgtgtgcattcttgttccatttgtgatcttagagggaaaactttcagtttttcatcattgaataacattagctgtggtctttctatatatggccttcattatgttgaagtaatttccatatctttctagcgaattgagcgtttttgtttttgtttttttgagacagaatcttgctcttgtcacccaggctggagtgcaatgatgctatctcacctcactgccagctccgcctcccgggttctcaagtgattgtcctgcctcagcctcccgagtagctggaattacaggcgcccaccaccatgcccgattagtttttgtatttttagtagagacagggtttcactgtgttggccaggctggtctcacactcctgacctcaggtgatccacccaccttgcccttctaaagtgctgggattacaggcatgagccaccctgtctggcctttttttaaatcctaaaagggtgttgatttttgtcaaatgcttcttctgagtcagttgagattattggtttttgtcctaagaatgcagtgtattaaagtgatttttttgtatgttgaaccatccttggattttatgaataaattccagttgagaatttatgaaatataatctttttaatgcattgttgaattctgtttcttggtattttgttgattttttttgcatcagtatttattagggattcttttttcttgtaaatttgtctgatttcgatatctaagtaatgcttacctcataaaatgattttgaaagtgttctgtcctctagttttttcaaagagtttgagaagggttgttagtttttaaatgtttggtagagttttcagtgaagccctggcgttgttggacagttactgattcaatctctaatagttataggtccattcagaagttgtatgtatttgtggctcagtcttggtgggtttgatgtgtctatccgttctcaaaggttatcaaatttttttgggtcatagttgttcatattagtcttttaaggtcctatttatttctgtggcagcagttgttgtatcgcctttctaatttccagttgttgctgtttgtgtctattctcttcatttcttaatctaagaatttgccagttttgttgatcttttcaataaaacagctactcctaattttgttgattttttttctattgcaaaaattttctatttttctctattttattttagctgtaatttatttttattttttttattttttggtaagtttgagtctcatttgttcttcatttcctaattccataagatgtaaagttaatttgttgatttaaggtttttcttcctttctaactgtgaaatatgacactgtaaaacagattttcattttacagatgaattatgtaaatatttagttctacaattttacttttttttttatcatatatcacgcattctggatattgagactataaaaatgaaaaaaacagttcttttcttttcttttttttttttgagacagagtctcgctcttttgcccaggccacagtgcagtggctctgtctcggctcactgcaagctccgcctcccgggttcatgccattcttctgcatcagcctcccaagtagctgggactataggcgcccaccacggcgcccagctaatttttttttgtatttttagtagggacgtagtttcaccatgttagccaggatggtctcgatctcctgacctcatgatccgcctgcctcggcctcccaaagtgctgggattagaggcgtggcgtgagccactgcacccggccataaaacagtaattgaaggttaacctatatttcaaacaactgaaaatactgatttgttcatatttattttttcatgaaaatcgtcttgttctatatttaataggtttttgttcggttcatggtactaatgagttcacaattgtaggtttagtcttgaaataatctaaattcacttcatcccattgtaacagaccctacatcatactgaatatagttgtgtcacagatgtctcttacagtctatttctacaaggcctagaactatttaggataccgttgctcactcttacaaattttaacattaaaaataactttgagatggaatggagttttgcaacgtctcagaacaaagagactccacttacgagaaattactaagcagtggttcctagctttatagactaattatataagccttcagttgtttctattttatatctgttttttagattcctcacatgttcattctgctttaccttctgtataatataaaggtcactctacttacagtcacattttccttttaatctttccgtttttattttttattctttgctttgttcaccattagtttttatattgcatctcacagttcatgtttcttttttgtcatttctgattctaattgtaattctaatcttacttgtttggcgttcactgtcacatcttcactttctggcagctgtttctatggcttcatcttcttagtgcttgtattcattgcttatattccagttgtcttgtaaattcatttttttagtgaactaagccagacacggaaagacagatatcacatgttctcactgatatgtgggaactaaaaaaacattgaacacaaattttacagctgacacacatatgcctgccacctagattctgccattaatacttacattgctttatcgtataaccatccttgtatccatcaatccatcttaatttttatgcctttcaaagttaattgctaacattagtacacatccctctaggtgaaaccatttttaaactgattgctgtcaagttgtctagagtaaactctgatcttccaagtatgacttattccataggacttctgtttgtagcactgtcccattaattcaatcatagaaataaataattggaaagtattgtctgttttaaatggataagtattttcatgtgtctgactttagaggacttttactagaaggtctcacttgaccttcattgctgactaaataagaaaagtttgttttattttaaaaatcaacacattataacatactttgttttttgagtaataagaaaagtcaatggaatgtgaagaaattatagcaagtaagctgttgttcctcttctaggaattttgattatgaacagctgataaggtattactaagggatctcatcagggaaattcctttctttccttctttttcttttgcatcctctccctttcctcactttcttttcccctttttcccttttcccctctcctcttcttttctttaatagtacttggggaaaggtataccttttattttacggatttgctcagggtaaagagagagttaagaggccaaatgattagatggcagggtcactggagggcagagataaataatagatcctaaactaagggttggcaaacattttctgtaaagggcaggtggtatttgttttaggttttgcaggcctaaagtactcaactctgccattgtagtatgaaaaacagccataaactatatagtatattgtattagtcctttttcacgctgctgataaagacgtacctgagactgggaaaaaaaaaagaagtttaattggacttacacttccacatggctgggaaggcttcagaatcatggcgaaaggtgaaagacacttcttgcatggcagtgacaagagaaaatgagaaggatgcaaaagcggaaacccctgataaaaccatcagatctcgtgagacttactaccacaagaacagcatgtgggaaactgcccccatgattcagattatctcccagggggtcactcctacaacacatgagaattatgggagtacaattcaagatgagatttgggtggggacacagagccaaagcattatcatatatagtatatttataaatcaatgaacttgggtatgttccagtacacttgatggatactggaacttgaatttcttataattttcacgttacaaactattattatttttcaaactttttccagccatttaaaaatgtaaaatattctaagcttgagagacataaacaggtggtggactcgatttgacttacgagctatgatttggtgacccatatggtacaaggatttcccttgcgcaggaactataccaaaaagtcgttattagtgtatacttttccaacgtagaggcccttttatgtgctctaaattttgtatgccttttacatatcctaaattagatagtgatgcagatgaggtcagataaattaaggtgtcattggagtgaggaaaaaagaagaatgcttaatatagttgattccaccattaacttggaggttctggcatggcttcctttagtcctgtctcatcagtgtagctgctatttgttaaacttggcacagaaaggcagatcaaatatagagggctactttcagatcctcctcttaatagttattaaaagctcaagtttagtagctgagttcaaatctcttattagatgtatgacttatgtaatttctctgagcatcagcagaatgaaggtttatagtgctaactcatacacttgtgagggtgatagtaacaattacaacaataatagtagtagctaacactttcatagtgcttagtatgtgccaggcaatgttctaagcactttatatatattaacacatttaattttctcacaattggtaatgtgaagaagaataatactctcaccatgataatgctcgtagatactaccatttaaattacgaggaaacttacgtccagaaagatcaagtaattcattcagggtcacatagttaattaagaggtagagccattatgtgaacttgggcatctggcctcagaatgcgagctcttaactgttaaggtttattcccctctaaagtgggaatgtctataaaatgcatagcacataggtcctcaacaaattagagagaaattaactttgcagaatatagtggttccatttcctcaagaaacttggtctgcctttgtggtaccagatagatgcataaatgtgaggttcacgttatgattcttcagatttttttcccagttgcacattagttatgagatttttttccatagaattcttcagtattactcatgttaaaaaataattattttgaaatgaatcaccttctgcaaaacaatatagtcaaaatgacttagactctgaagctgaaagactcctggactcctattcttgtcttggttctgtactttctttgagatcttggtttcgtgatttgactccagttctatttctctctttggctgtggactgaagataatcctcaatgtcatggtattcaaatgagataacccatgtcaaagtgccccgcagtgtgtgtaataagttatcaggcatccagcaaatactagtttcttgctcacctccctattacataaaataactttaaaattagaactgaagggactcataaagctgggaaaactgaggcccagacaattgtttccctaggatcctacagctgcttagggacagaaggatgacacttaatgcagatcttctgatttttcagtctcgttctgtttgtgctgatcactctcctcctatgtagtatataaagaagtactatgtatctgacaagttttggggaggttattttagtataaaagctcacattaaaaatatctattttggtattttgacttttgtaatttttttaaaaatcagagacaatttagtaaatctcggggccattcaaatcatgtatatgaagttttataactgctattgttttccccttatagttattaatttttaatatgcaagtagcatccttactatggaaagaataaataagaaatcaaaagatggaagaagttttaaaactcacttaatcacatcatccagagaaaatgctattaatgctttgaaataacaatgggttcatcctacacctgctactttttaactgacttttgtcagttagtgatatatcaggaagactaggcagttctttgtcgaattcaaatcttgatagtttttattttattgtgtgacctattatcagttcatttaagtaatcttttattagacatgtttttttcagatatagaaacaatgcatttttgtaaaattgtcaaattattttccacaagtaggatctcattcacacggtattcgtgtttttaagactttcgatacatgttcactgttttcctccagaaaggaaatacctacttacattttcaccagggaagtcactgtagtttgggagaacatgacattatctccctttctttactgaagggtagcaatatatattttaaattttctagattctgcatttccattttatttttacatgttttcactttcatattttgcatagtgctaaatctgtgataacagtttttaattttcaggtggggtttatagcttcatagatagcaaaatgtctttaagtcatgtttatgcaatttttacatgtgctttgtgggttttcttttttctctgtttgcatgcagtgagtggtaaatttgcatggaacatttgaaaaataagcaccagaatgaattgaatgtgtgtgaattatcactttttgtcacctacctggacagagagtgaaagttcttctgttgagacaaaattggatctcgtgtgtttcttcacttacttgctgccttgttaattgttgagtttctcatgattagcaagatgtaaactctggcattggtcatctagtcctacatgttagataattctgtgaatgttttgaaaatcagctgaactatttttcttataattttgattctttgtagttgttatttccatgcttgtgaatttgggaccaaaaggaatggctatgacttatgtttctttggatccagtagtttattctactgaaattatggtaattttatcagttagtagaagcatagactctttagtgttgaatataatgtcatctaacttcttacatggtcacataattcctccctcagttttggtagctctcctgaaacagccataataggacattaatctgtgtactttaagttgacagagtaaaaggaatataagatttcacgtgatggaacttaaaatattccatcttgtgacgtggaactaatgaggaggtttagtgacaagttttagatttaagattctacactttggagcctctttttctttttctttttggtttttgtttgtttgtttgtttttgagacaaagtctagctctgttgcccaggctggagtgcagtggtgcaatttcagcttatggcagccttgactctcaggctcaagtgatcctcagcctcccaagtagctgggactacaggtgcatgccaccacacttggctaattttttttaaaaaagtttgtagagagtagcctcactatgttgcccaggctggtgttgacctcctgggctcaagtagtcggcctgcctcagcctcccacagttatgggattgattacagtcatgatctgcctcactcaggctgcagccgctttctttcagtgtaacactatctttggatattccacttacaaatttatttttaagtctcccatgttgttgataattgggaaaaatagtttttattccagatagatattctgtgttaactataagtcaaatgtttacaagctgttaaaaatgaaatactgattatgtaaaagaaaaccggattgatgctttaaatagactcattttcctaatgctaatttttaaaatgatagaatcctacaactcttagctgtaaaccttgtgatttttcagctgttgtactaaacaacttaagcacatataccatcagacaagcccccctccccccttttaaaccaaaggaatgtatactctgttaatacagtcagtaagcattgacattctttatcataatatcctagaaaatatttattaactatttcactagtcaggagttgtggtaaatagtgcatctccattttctacttctcatcttcatacacaggttaatcacttcagtgcttgactaacttttgccttgatgatatgttgagctttgtacttgagagctgtactaatcactgtgcttattgtttgaatgtttggtacaggaagcgagcagctgcaaagcatctaatagaacgctactaccaccagttaactgagggctgtggaaatgaagcctgcacgaatgagttttgtgcttcctgtccaacttttcttcgtatggataataatgcagcagctattaaagccctcgagctttataagattaatgcaaaactctgtgatcctcatccctccaagaaaggagcaagctcagcttaccttgagaactcgaaaggtgcccccaacaactcctgctctgagataaaaatgaacaagaaaggcgctagaattgattttaaaggtaagatgttttattttcaattgagaattgttgcctgaaaaccatgtgggagatttaaatgtattagtttttatttgttttttcttctgtgacataaagacattttgatatcgtagaaccaattttttattgtggtaacggacaggaataataactacattttacaggtctaatcattgctaattagaagcagatcatatgccaaaagttcatttgttaatagattgatttgaactttttaaaattcttaggaaaaatgtattaagtggtagtgaatctccaaaactaggccacaacatctatttaagttatagaataactggactaagtatctggcatgagttctggaacctcaggatgatgtgatgaaagaagcagaaagaggaaacagtgggttttttccatttttgaaggcaagacaaaattttgtgatagttatgtgagaattctacgtttccttcagatatatgcttctcactctccttccggacatttggtacagtcatgctgccaaggatcatgacctaccaatgacagtcttcactcaggtcttttgttttctaaatggtcctacgtccaaaattcagaattcgattaccttgtcgctaatactaaaactccaagttattttcttcagtgaaggtaattagtaacaaagtaatcaaatttttgaatgactaccagggcttagcgcccctccactctcacccctacacacacccagaggcaattgtattttaagagagaaagctttttttttatgacatacaagtcagagaattttagaggcatttgcctctaaaactttcactaacatcatttgaatcaagtttgaaagaattagtgaagtggcattgtgttataacctctactctgtttccacaataaaattattttcgtcactttacacaactttgttgcttcagagtgtataattctgtttcatgaattagttcacacactatgggaaaataggtaaatgttgtctgtatatatagtgtgtcagtataatgtggaagctgcattgactttattgtacacagttctccagtaagtgtgcaccagagagtaccagtaactgaatgtagagtgctggcacagtggaatgcagccagctgcgggggatgtggtacatgaggaatgtgctcatctgctcttttggccacgtgctccatcttagaggtgcttattgtgtggctttatccagtctttatgccccctcctctttttgctcaagtctgcattatagcagttgtgacctttccttatccctgttttctaatatgctactgttactgttccctgttcgttactggtttttttgtttttgtttttgcattgttctatagttactattgtatattggaaattagagatgctttctgtacactagtactcttattttgattattaattatgtttgttaacactaattacaaagttgcataagtattaagtagtctgcaccaaactgtttttgcgtaggaggtttttaagtgcaaaatttaaaagattgagtattttcagggacacatttatcacaagaaatcttataaaaatgtctttctcagtagaacacctgtatcaataaaccaaactttttgaatgttcatatctaattacagtgttttttgactaatttttatctatatacctgaaaaattcagtttaacatattaaacactacaggccaggcacagtggctcacgcctgtaatcccagcactttgggaggctgaggcgggcgaatcacgacgtcaagagatcgagaccaacctggccaacgtggtgaaaccccctctctactaaaaatacaaaaaaattagccagttgtggtggcgtgcatctgtagtcccagctacttgggaggctgaggtaggagaatcgtttgaacccgggaggcagaagttgcagtgagccgaaatggtgccactgcattccaacctggcaacagagtgagactccatgtcaaaaaacaacaacaaaaaacactccttggaaaaagtataggtacattctatataggattagtagactgtcagaatcacttgaagatgttccgaaagcatgacatatcaacaaaggacatgtgagtctagaatggtgatccctaggacaggccatattactgcatgcaaagcaagtctttgttaaccttatgacttgctcaggaagcaaagtgtttcatgtcctaataggatagtagtattttctgttatgttacattttaggaaattaggagttttgcattgtcttgtaagaaggtattttaaaaattttcaatgaaaataatgagaaataggtttccagtggttttatgcttttggggaagaggttactgatgtttagcaaaagatgcttatatattcttaatagaacaaacctgagaattagttcttaaagagttaaggcccataaaagaaactgtaagtgttggtactcttgtagctgggccacagatcagatccttagtatgataaaatttggtatttttgtgcttcaatttttggagaccattcaatgatcacttacattttatattgtctttcattgtgaaacatatattatagcagaggtgggagtcattaaaaattctacatgttgtacactacatgtataagggtatatttggcgcaatggaggtaggattgtctgtgtgcctctaaaattaacctctcaagtagttaatctgatgatgacaagtatgtcactttattgataaaagggagaattaagactattctcagtattatgttggtcagtacacaaaatatatcatttgtttttacctgtgaaatgaaatatctttcatcctattagccagaagggagaaagccttggcctgaaaataacacttatctcaaaaagttgggaaatgtggtccaactctgtgcccaggaaaagaggaaatagattttgatgactacatagtctctgcactgcttgccagctcataagtttacttctttgcactgtttgttttcattgctcaaaaactattttctgtcactctatgagatttagtctaacctgattcctggctgtggaaagcagtttctacttaagagccgatgagaaatggtatattcttctcaatcactcacagaatgactaccctggaacaaactaggaagacccaaaatgaaccagtttgattttaatacatacatagatgctgaaggagcctttttttaagaccttgccttcttagtctttggagaacagagtactgaaacaagaaaactcacagattagtagtatttctgtgtgttctacagtgaggttttaagagctgtattatgattaatcagtacatgacatattggttcatatttataattaaagctatacattaatagatatcttgattataaagaaagtttaaactcatgatcttattaagagttatacattgttgaaagaatgtaaaagcatgggtgaggtcattggtataggtaggtagttcattgaaaaaaataggtaagcattaaattttgtttgctgaatctaagtattagatactttaagagttgtatatcataaatgatattgagcctagaatgtttggctgttttacttttagaactttttgcaacagagtaaacatacatattatgaaaataaatgttctcttttttcctctgattttctagatgtgacttacttaacagaagagaaggtatatgaaattcttgaattatgtagagaaagagaggattattcccctttaatccgtgttattggaagagttttttctagtgctgaggcattggtacagagcttccggaaagttaaacaa

SEQ ID NO: 2 - DNA, 16 bp, synthetic construct
  source 1..16: mol_type = other DNA
tggtcgtagtcgccct

SEQ ID NO: 3 - DNA, 16 bp, synthetic construct
  source 1..16: mol_type = other DNA
actggtcgtagtcgcc

SEQ ID NO: 4 - DNA, 16 bp, synthetic construct
  source 1..16: mol_type = other DNA
ccagtctagctgctac

SEQ ID NO: 5 - DNA, 16 bp, synthetic construct
  source 1..16: mol_type = other DNA
acatcagggtgatcac

SEQ ID NO: 6 - DNA, 16 bp, synthetic construct
  source 1..16: mol_type = other DNA
gccattcggtgacatc

SEQ ID NO: 7 - DNA, 16 bp, synthetic construct
  source 1..16: mol_type = other DNA
caagctgtggccattc

SEQ ID NO: 8 - DNA, 16 bp, synthetic construct
  source 1..16: mol_type = other DNA
acaagctgtggccatt

SEQ ID NO: 9 - DNA, 16 bp, synthetic construct
  source 1..16: mol_type = other DNA
gcaaaacaaaaaataa

SEQ ID NO: 10 - DNA, 16 bp, synthetic construct
  source 1..16: mol_type = other DNA
taagtaccccaagatt

SEQ ID NO: 11 - DNA, 16 bp, synthetic construct
  source 1..16: mol_type = other DNA
ccacagccctcagtta

SEQ ID NO: 12 - DNA, 16 bp, synthetic construct
  source 1..16: mol_type = other DNA
tcgtgcaggcttcatt

SEQ ID NO: 13 - DNA, 17 bp, synthetic construct
  source 1..17: mol_type = other DNA
cgttctctttcgctgcc

SEQ ID NO: 14 - DNA, 17 bp, synthetic construct
  source 1..17: mol_type = other DNA
accgcctcgttctcttt

SEQ ID NO: 15 - DNA, 17 bp, synthetic construct
  source 1..17: mol_type = other DNA
tggtcgtagtcgccctc

SEQ ID NO: 16 - DNA, 17 bp, synthetic construct
  source 1..17: mol_type = other DNA
ctggtcgtagtcgccct

SEQ ID NO: 17 - DNA, 17 bp, synthetic construct
  source 1..17: mol_type = other DNA
actggtcgtagtcgccc

SEQ ID NO: 18 - DNA, 17 bp, synthetic construct
  source 1..17: mol_type = other DNA
cactggtcgtagtcgcc

SEQ ID NO: 19 - DNA, 17 bp, synthetic construct
  source 1..17: mol_type = other DNA
ctcttacagatttttaa

SEQ ID NO: 20 - DNA, 17 bp, synthetic construct
  source 1..17: mol_type = other DNA
aaaatcaggctcttaca

SEQ ID NO: 21 - DNA, 17 bp, synthetic construct
  source 1..17: mol_type = other DNA
attctaaaatcaggctc

SEQ ID NO: 22 - DNA, 17 bp, synthetic construct
  source 1..17: mol_type = other DNA
atatttcgccaaacttc

SEQ ID NO: 23 - DNA, 17 bp, synthetic construct
  source 1..17: mol_type = other DNA
cgtaggcttaataactc

SEQ ID NO: 24 - DNA, 17 bp, synthetic construct
  source 1..17: mol_type = other DNA
tctgagcgtaggcttaa

SEQ ID NO: 25 - DNA, 17 bp, synthetic construct
  source 1..17: mol_type = other DNA
ctagctgctaccttgat

SEQ ID NO: 26 - DNA, 17 bp, synthetic construct
  source 1..17: mol_type = other DNA
aggttgtcacaccagtc

SEQ ID NO: 27 - DNA, 17 bp, synthetic construct
  source 1..17: mol_type = other DNA
aacaggttgtcacacca

SEQ ID NO: 28 - DNA, 17 bp, synthetic construct
  source 1..17: mol_type = other DNA
aaacaggttgtcacacc

SEQ ID NO: 29 - DNA, 17 bp, synthetic construct
  source 1..17: mol_type = other DNA
agctttgagtcactgat

SEQ ID NO: 30 - DNA, 17 bp, synthetic construct
  source 1..17: mol_type = other DNA
gccattcggtgacatca

SEQ ID NO: 31 - DNA, 17 bp, synthetic construct
  source 1..17: mol_type = other DNA
ggccattcggtgacatc

SEQ ID NO: 32 - DNA, 17 bp, synthetic construct
  source 1..17: mol_type = other DNA
acaagctgtggccattc

SEQ ID NO: 33 - DNA, 17 bp, synthetic construct
  source 1..17: mol_type = other DNA
tacaagctgtggccatt

SEQ ID NO: 34 - DNA, 17 bp, synthetic construct
  source 1..17: mol_type = other DNA
ttacaagctgtggccat

SEQ ID NO: 35 - DNA, 17 bp, synthetic construct
  source 1..17: mol_type = other DNA
tttacaagctgtggcca

SEQ ID NO: 36 - DNA, 17 bp, synthetic construct
  source 1..17: mol_type = other DNA
ttttacaagctgtggcc

SEQ ID NO: 37 - DNA, 17 bp, synthetic construct
  source 1..17: mol_type = other DNA
cgtcagactgaggttct

SEQ ID NO: 38 - DNA, 17 bp, synthetic construct
  source 1..17: mol_type = other DNA
gtcgtcagactgaggtt

SEQ ID NO: 39 - DNA, 17 bp, synthetic construct
  source 1..17: mol_type = other DNA
tagcttcaatgtcgtca

SEQ ID NO: 40 - DNA, 17 bp, synthetic construct
  source 1..17: mol_type = other DNA
cggctagcttcaatgtc

SEQ ID NO: 41 - DNA, 17 bp, synthetic construct
  source 1..17: mol_type = other DNA
attcggctagcttcaat

SEQ ID NO: 42 - DNA, 17 bp, synthetic construct
  source 1..17: mol_type = other DNA
cattcggctagcttcaa

SEQ ID NO: 43 - DNA, 17 bp, synthetic construct
  source 1..17: mol_type = other DNA
ttgcagctgctcgcttc

SEQ ID NO: 44 - DNA, 17 bp, synthetic construct
  source 1..17: mol_type = other DNA
ctttgcagctgctcgct

SEQ ID NO: 45 - DNA, 17 bp, synthetic construct
  source 1..17: mol_type = other DNA
ggtggtagtagcgttct

SEQ ID NO: 46 - DNA, 17 bp, synthetic construct
  source 1..17: mol_type = other DNA
tggtggtagtagcgttc

SEQ ID NO: 47 - DNA, 17 bp, synthetic construct
  source 1..17: mol_type = other DNA
ctggtggtagtagcgtt

SEQ ID NO: 48 - DNA, 17 bp, synthetic construct
  source 1..17: mol_type = other DNA
acagccctcagttaact

SEQ ID NO: 49 - DNA, 17 bp, synthetic construct
  source 1..17: mol_type = other DNA
acagccctcagttaaca

SEQ ID NO: 50 - DNA, 17 bp, synthetic construct
  source 1..17: mol_type = other DNA
acagccctaagttaact

SEQ ID NO: 51 - DNA, 17 bp, synthetic construct
  source 1..17: mol_type = other DNA
cacagccctcagttaac

SEQ ID NO: 52 - DNA, 17 bp, synthetic construct
  source 1..17: mol_type = other DNA
ccacagccctcagttaa

SEQ ID NO: 53 - DNA, 17 bp, synthetic construct
  source 1..17: mol_type = other DNA
tccacagccctcagtta

SEQ ID NO: 54 - DNA, 17 bp, synthetic construct
  source 1..17: mol_type = other DNA
caggcttcatttccaca

SEQ ID NO: 55 - DNA, 17 bp, synthetic construct
  source 1..17: mol_type = other DNA
gcaggcttcatttccac

SEQ ID NO: 56 - DNA, 17 bp, synthetic construct
  source 1..17: mol_type = other DNA
gtgcaggcttcatttcc

SEQ ID NO: 57 - DNA, 17 bp, synthetic construct
  source 1..17: mol_type = other DNA
cgtgcaggcttcatttc

SEQ ID NO: 58 - DNA, 17 bp, synthetic construct
  source 1..17: mol_type = other DNA
tcgtgcaggcttcattt

SEQ ID NO: 59 - DNA, 17 bp, synthetic construct
  source 1..17: mol_type = other DNA
ttcgtgcaggcttcatt

SEQ ID NO: 60 - DNA, 17 bp, synthetic construct
  source 1..17: mol_type = other DNA
attcgtgcaggcttcat

SEQ ID NO: 61 - DNA, 17 bp, synthetic construct
  source 1..17: mol_type = other DNA
aagcacaaaactcattc

SEQ ID NO: 62 - DNA, 17 bp, synthetic construct
  source 1..17: mol_type = other DNA
tggacaggaagcacaaa

SEQ ID NO: 63 - DNA, 17 bp, synthetic construct
  source 1..17: mol_type = other DNA
agttggacaggaagcac

SEQ ID NO: 64 - DNA, 17 bp, synthetic construct
  source 1..17: mol_type = other DNA
aagttggacaggaagca

SEQ ID NO: 65 - DNA, 17 bp, synthetic construct
  source 1..17: mol_type = other DNA
ccatacgaagaaaagtt

SEQ ID NO: 66 - DNA, 17 bp, synthetic construct
  source 1..17: mol_type = other DNA
ttaatcttataaagctc

SEQ ID NO: 67 - DNA, 17 bp, synthetic construct
  source 1..17: mol_type = other DNA
ctgagcttgctcctttc

SEQ ID NO: 68 - DNA, 17 bp, synthetic construct
  source 1..17: mol_type = other DNA
gctgagcttgctccttt

SEQ ID NO: 69 - DNA, 17 bp, synthetic construct
  source 1..17: mol_type = other DNA
ggtaagctgagcttgct

SEQ ID NO: 70 - DNA, 17 bp, synthetic construct
  source 1..17: mol_type = other DNA
tcaaggtaagctgagct

SEQ ID NO: 71 - DNA, 17 bp, synthetic construct
  source 1..17: mol_type = other DNA
gttaagtaagtcacatc

SEQ ID NO: 72 - DNA, 17 bp, synthetic construct
  source 1..17: mol_type = other DNA
aattcaagaatttcata

SEQ ID NO: 73 - DNA, 17 bp, synthetic construct
  source 1..17: mol_type = other DNA
tcctctctttctctaca

SEQ ID NO: 74 - DNA, 17 bp, synthetic construct
  source 1..17: mol_type = other DNA
cagcactagaaaaaact

SEQ ID NO: 75 - DNA, 17 bp, synthetic construct
  source 1..17: mol_type = other DNA
tgcctcagcactagaaa

SEQ ID NO: 76 - DNA, 18 bp, synthetic construct
  source 1..18: mol_type = other DNA
tcgttctctttcgctgcc

SEQ ID NO: 77 - DNA, 18 bp, synthetic construct
  source 1..18: mol_type = other DNA
gcctcgttctctttcgct

SEQ ID NO: 78 - DNA, 18 bp, synthetic construct
  source 1..18: mol_type = other DNA
actggtcgtagtcgccct

SEQ ID NO: 79 - DNA, 18 bp, synthetic construct
  source 1..18: mol_type = other DNA
tcactggtcgtagtcgcc

SEQ ID NO: 80 - DNA, 18 bp, synthetic construct
  source 1..18: mol_type = other DNA
cctgtctggggccccggc

SEQ ID NO: 81 - DNA, 18 bp, synthetic construct
  source 1..18: mol_type = other DNA
ccaaacttctgaggagct

SEQ ID NO: 82 - DNA, 18 bp, synthetic construct
  source 1..18: mol_type = other DNA
ctagctgctaccttgatc

SEQ ID NO: 83 - DNA, 18 bp, synthetic construct
  source 1..18: mol_type = other DNA
aggttgtcacaccagtct

SEQ ID NO: 84 - DNA, 18 bp, synthetic construct
  source 1..18: mol_type = other DNA
ggccattcggtgacatca

SEQ ID NO: 85 - DNA, 18 bp, synthetic construct
  source 1..18: mol_type = other DNA
tggccattcggtgacatc

SEQ ID NO: 86 - DNA, 18 bp, synthetic construct
  source 1..18: mol_type = other DNA
tacaagctgtggccattc

SEQ ID NO: 87 - DNA, 18 bp, synthetic construct
  source 1..18: mol_type = other DNA
cttttacaagctgtggcc

SEQ ID NO: 88 - DNA, 18 bp, synthetic construct
  source 1..18: mol_type = other DNA
gactgaggttctcctgat

SEQ ID NO: 89 - DNA, 18 bp, synthetic construct
  source 1..18: mol_type = other DNA
tcagactgaggttctcct

SEQ ID NO: 90 - DNA, 18 bp, synthetic construct
  source 1..18: mol_type = other DNA
tcagactgaggttctccc

SEQ ID NO: 91 - DNA, 18 bp, synthetic construct
  source 1..18: mol_type = other DNA
tcagactgacgttctcct

SEQ ID NO: 92 - DNA, 18 bp, synthetic construct
  source 1..18: mol_type = other DNA
cgtcagactgaggttctc

SEQ ID NO: 93 - DNA, 18 bp, synthetic construct
  source 1..18: mol_type = other DNA
gtcgtcagactgaggttc

SEQ ID NO: 94 - DNA, 18 bp, synthetic construct
  source 1..18: mol_type = other DNA
tgtcgtcagactgaggtt

SEQ ID NO: 95 - DNA, 18 bp, synthetic construct
  source 1..18: mol_type = other DNA
gcttcaatgtcgtcagac

SEQ ID NO: 96 - DNA, 18 bp, synthetic construct
  source 1..18: mol_type = other DNA
gctagcttcaatgtcgtc

SEQ ID NO: 97 - DNA, 18 bp, synthetic construct
  source 1..18: mol_type = other DNA
tcggctagcttcaatgtc

SEQ ID NO: 98 - DNA, 18 bp, synthetic construct
  source 1..18: mol_type = other DNA
tttgcagctgctcgcttc

SEQ ID NO: 99 - DNA, 18 bp, synthetic construct
  source 1..18: mol_type = other DNA
ctttgcagctgctcgctt

SEQ ID NO: 100 - DNA, 18 bp, synthetic construct
  source 1..18: mol_type = other DNA
gctttgcagctgctcgct

SEQ ID NO: 101 - DNA, 18 bp, synthetic construct
  source 1..18: mol_type = other DNA
agatgctttgcagctgct

SEQ ID NO: 102 - DNA, 18 bp, synthetic construct
  source 1..18: mol_type = other DNA
ctggtggtagtagcgttc

SEQ ID NO: 103 - DNA, 18 bp, synthetic construct
  source 1..18: mol_type = other DNA
actggtggtagtagcgtt

SEQ ID NO: 104 - DNA, 18 bp, synthetic construct
  source 1..18: mol_type = other DNA
cacagccctcagttaact

SEQ ID NO: 105 - DNA, 18 bp, synthetic construct
  source 1..18: mol_type = other DNA
ccacagccctcagttaac

SEQ ID NO: 106 - DNA, 18 bp, synthetic construct
  source 1..18: mol_type = other DNA
tccacagccctcagttaa

SEQ ID NO: 107 - DNA, 18 bp, synthetic construct
  source 1..18: mol_type = other DNA
ttccacagccctcagtta

SEQ ID NO: 108 - DNA, 18 bp, synthetic construct
  source 1..18: mol_type = other DNA
gcaggcttcatttccaca

SEQ ID NO: 109 - DNA, 18 bp, synthetic construct
  source 1..18: mol_type = other DNA
tgcaggcttcatttccac

SEQ ID NO: 110 - DNA, 18 bp, synthetic construct
  source 1..18: mol_type = other DNA
gtgcaggcttcatttcca

SEQ ID NO: 111 - DNA, 18 bp, synthetic construct
  source 1..18: mol_type = other DNA
cgtgcaggcttcatttcc

SEQ ID NO: 112 - DNA, 18 bp, synthetic construct
  source 1..18: mol_type = other DNA
tcgtgcaggcttcatttc

SEQ ID NO: 113 - DNA, 18 bp, synthetic construct
  source 1..18: mol_type = other DNA
cattcgtgcaggcttcat

SEQ ID NO: 114 - DNA, 18 bp, synthetic construct
  source 1..18: mol_type = other DNA
ggacaggaagcacaaaac

SEQ ID NO: 115 - DNA, 18 bp, synthetic construct
  source 1..18: mol_type = other DNA
agttggacaggaagcaca

SEQ ID NO: 116 - DNA, 18 bp, synthetic construct
  source 1..18: mol_type = other DNA
aagttggacaggaagcac

SEQ ID NO: 117 - DNA, 18 bp, synthetic construct
  source 1..18: mol_type = other DNA
ctgagcttgctcctttct

SEQ ID NO: 118 - DNA, 18 bp, synthetic construct
  source 1..18: mol_type = other DNA
gctgagcttgctcctttc

SEQ ID NO: 119 - DNA, 18 bp, synthetic construct
  source 1..18: mol_type = other DNA
agctgagcttgctccttt

SEQ ID NO: 120 - DNA, 18 bp, synthetic construct
  source 1..18: mol_type = other DNA
taagctgagcttgctcct

SEQ ID NO: 121 - DNA, 18 bp, synthetic construct
  source 1..18: mol_type = other DNA
ggtaagctgagcttgctc

SEQ ID NO: 122 - DNA, 18 bp, synthetic construct
  source 1..18: mol_type = other DNA
aggtaagctgagcttgct

SEQ ID NO: 123 - DNA, 18 bp, synthetic construct
  source 1..18: mol_type = other DNA
cccccgcagctggctgca

SEQ ID NO: 124 - DNA, 18 bp, synthetic construct
  source 1..18: mol_type = other DNA
tcccccgcagctggctgc

SEQ ID NO: 125 - DNA, 20 bp, synthetic construct
  source 1..20: mol_type = other DNA
gttctctttcgctgccgcca

SEQ ID NO: 126 - DNA, 20 bp, synthetic construct
  source 1..20: mol_type = other DNA
tcgttctctttcgctgccgc

SEQ ID NO: 127 - DNA, 20 bp, synthetic construct
  source 1..20: mol_type = other DNA
ctcgttctctttcgctgccg

SEQ ID NO: 128 - DNA, 20 bp, synthetic construct
  source 1..20: mol_type = other DNA
gcctcgttctctttcgctgc

SEQ ID NO: 129 - DNA, 20 bp, synthetic construct
  source 1..20: mol_type = other DNA
cgcctcgttctctttcgctg

SEQ ID NO: 130 - DNA, 20 bp, synthetic construct
  source 1..20: mol_type = other DNA
accgcctcgttctctttcgc

SEQ ID NO: 131 - DNA, 20 bp, synthetic construct
  source 1..20: mol_type = other DNA
caccgcctcgttctctttcg

SEQ ID NO: 132 - DNA, 20 bp, synthetic construct
  source 1..20: mol_type = other DNA
ccaccgcctcgttctctttc

SEQ ID NO: 133 - DNA, 20 bp, synthetic construct
  source 1..20: mol_type = other DNA
gccaccgcctcgttctcttt

SEQ ID NO: 134 - DNA, 20 bp, synthetic construct
  source 1..20: mol_type = other DNA
tcactggtcgtagtcgccct

SEQ ID NO: 135 - DNA, 20 bp, synthetic construct
  source 1..20: mol_type = other DNA
attctaaaatcaggctctta

SEQ ID NO: 136 - DNA, 20 bp, synthetic construct
  source 1..20: mol_type = other DNA
ctggtgaattctaaaatcag

SEQ ID NO: 137 - DNA, 20 bp, synthetic construct
  source 1..20: mol_type = other DNA
cttctgaggagctggtgaat

SEQ ID NO: 138 - DNA, 20 bp, synthetic construct
  source 1..20: mol_type = other DNA
acttctgaggagctggtgaa

SEQ ID NO: 139 - DNA, 20 bp, synthetic construct
  source 1..20: mol_type = other DNA
aacttctgaggagctggtga

SEQ ID NO: 140 - DNA, 20 bp, synthetic construct
  source 1..20: mol_type = other DNA
aaacttctgaggagctggtg

SEQ ID NO: 141 - DNA, 20 bp, synthetic construct
  source 1..20: mol_type = other DNA
caaacttctgaggagctggt

SEQ ID NO: 142 - DNA, 20 bp, synthetic construct
  source 1..20: mol_type = other DNA
gccaaacttctgaggagctg

SEQ ID NO: 143 - DNA, 20 bp, synthetic construct
  source 1..20: mol_type = other DNA
cgccaaacttctgaggagct

SEQ ID NO: 144 - DNA, 20 bp, synthetic construct
  source 1..20: mol_type = other DNA
tcgccaaacttctgaggagc

SEQ ID NO: 145 - DNA, 20 bp, synthetic construct
  source 1..20: mol_type = other DNA
ttcgccaaacttctgaggag

SEQ ID NO: 146 - DNA, 20 bp, synthetic construct
  source 1..20: mol_type = other DNA
gctaccttgatctgagcgta

SEQ ID NO: 147 - DNA, 20 bp, synthetic construct
  source 1..20: mol_type = other DNA
tgctaccttgatctgagcgt

SEQ ID NO: 148 - DNA, 20 bp, synthetic construct
  source 1..20: mol_type = other DNA
ctagctgctaccttgatctg

SEQ ID NO: 149 - DNA, 20 bp, synthetic construct
  source 1..20: mol_type = other DNA
gtctagctgctaccttgatc

SEQ ID NO: 150 - DNA, 20 bp, synthetic construct
  source 1..20: mol_type = other DNA
cagtctagctgctaccttga

SEQ ID NO: 151 - DNA, 20 bp, synthetic construct
  source 1..20: mol_type = other DNA
ccagtctagctgctaccttg

SEQ ID NO: 152 - DNA, 20 bp, synthetic construct
  source 1..20: mol_type = other DNA
tcacaccagtctagctgcta

SEQ ID NO: 153 - DNA, 20 bp, synthetic construct
  source 1..20: mol_type = other DNA
gtcacaccagtctagctgct

SEQ ID NO: 154 - DNA, 20 bp, synthetic construct
  source 1..20: mol_type = other DNA
aggttgtcacaccagtctag

SEQ ID NO: 155 - DNA, 20 bp, synthetic construct
  source 1..20: mol_type = other DNA
caggttgtcacaccagtcta

SEQ ID NO: 156 - DNA, 20 bp, synthetic construct
  source 1..20: mol_type = other DNA
acaggttgtcacaccagtct

SEQ ID NO: 157 - DNA, 20 bp, synthetic construct
  source 1..20: mol_type = other DNA
ggtgatcacagctttgagtc

SEQ ID NO: 158 - DNA, 20 bp, synthetic construct
  source 1..20: mol_type = other DNA
ggccattcggtgacatcagg

SEQ ID NO: 159 - DNA, 20 bp, synthetic construct
  source 1..20: mol_type = other DNA
tggccattcggtgacatcag

SEQ ID NO: 160 - DNA, 20 bp, synthetic construct
  source 1..20: mol_type = other DNA
gtggccattcggtgacatca

SEQ ID NO: 161 - DNA, 20 bp, synthetic construct
  source 1..20: mol_type = other DNA
tgtggccattcggtgacatc

SEQ ID NO: 162 - DNA, 20 bp, synthetic construct
  source 1..20: mol_type = other DNA
gctgtggccattcggtgaca

SEQ ID NO: 163 - DNA, 20 bp, synthetic construct
  source 1..20: mol_type = other DNA
agctgtggccattcggtgac

SEQ ID NO: 164 - DNA, 20 bp, synthetic construct
  source 1..20: mol_type = other DNA
aagctgtggccattcggtga

SEQ ID NO: 165 - DNA, 20 bp, synthetic construct
  source 1..20: mol_type = other DNA
caagctgtggccattcggtg

SEQ ID NO: 166 - DNA, 20 bp, synthetic construct
  source 1..20: mol_type = other DNA
ttacaagctgtggccattcg

SEQ ID NO: 167 - DNA, 20 bp, synthetic construct
  source 1..20: mol_type = other DNA
cagactgaggttctcctgat

SEQ ID NO: 168 - DNA, 20 bp, synthetic construct
  source 1..20: mol_type = other DNA
tcagactgaggttctcctga

SEQ ID NO: 169 - DNA, 20 bp, synthetic construct
  source 1..20: mol_type = other DNA
gtcagactgaggttctcctg

SEQ ID NO: 170 - DNA, 20 bp, synthetic construct
  source 1..20: mol_type = other DNA
cgtcagactgaggttctcct

SEQ ID NO: 171 - DNA, 20 bp, synthetic construct
  source 1..20: mol_type = other DNA
gtcgtcagactgaggttctc

SEQ ID NO: 172 - DNA, 20 bp, synthetic construct
  source 1..20: mol_type = other DNA
tgtcgtcagactgaggttct

SEQ ID NO: 173 - DNA, 20 bp, synthetic construct
  source 1..20: mol_type = other DNA
atgtcgtcagactgaggttc

SEQ ID NO: 174 - DNA, 20 bp, synthetic construct
  source 1..20: mol_type = other DNA
caatgtcgtcagactgaggt

SEQ ID NO: 175 - DNA, 20 bp, synthetic construct
  source 1..20: mol_type = other DNA
gcttcaatgtcgtcagactg

SEQ ID NO: 176 - DNA, 20 bp, synthetic construct
  source 1..20: mol_type = other DNA
gctagcttcaatgtcgtcag

SEQ ID NO: 177 - DNA, 20 bp, synthetic construct
  source 1..20: mol_type = other DNA
ggctagcttcaatgtcgtca

SEQ ID NO: 178 - DNA, 20 bp, synthetic construct
  source 1..20: mol_type = other DNA
cggctagcttcaatgtcgtc

SEQ ID NO: 179 - DNA, 20 bp, synthetic construct
  source 1..20: mol_type = other DNA
tcggctagcttcaatgtcgt

SEQ ID NO: 180 - DNA, 20 bp, synthetic construct
  source 1..20: mol_type = other DNA
ttcggctagcttcaatgtcg

SEQ ID NO: 181 - DNA, 20 bp, synthetic construct
  source 1..20: mol_type = other DNA
tgctttgcagctgctcgctt

SEQ ID NO: 182 - DNA, 20 bp, synthetic construct
  source 1..20: mol_type = other DNA
atgctttgcagctgctcgct

SEQ ID NO: 183 - DNA, 20 bp, synthetic construct
  source 1..20: mol_type = other DNA
gatgctttgcagctgctcgc

SEQ ID NO: 184 - DNA, 20 bp, synthetic construct
  source 1..20: mol_type = other DNA
agatgctttgcagctgctcg

SEQ ID NO: 185 - DNA, 20 bp, synthetic construct
  source 1..20: mol_type = other DNA
ctggtggtagtagcgttcta

SEQ ID NO: 186 - DNA, 20 bp, synthetic construct
  source 1..20: mol_type = other DNA
actggtggtagtagcgttct

SEQ ID NO: 187 - DNA, 20 bp, synthetic construct
  source 1..20: mol_type = other DNA
aactggtggtagtagcgttc

SEQ ID NO: 188 - DNA, 20 bp, synthetic construct
  source 1..20: mol_type = other DNA
gttaactggtggtagtagcg

SEQ ID NO: 189 - DNA, 20 bp, synthetic construct
  source 1..20: mol_type = other DNA
agccctcagttaactggtgg

SEQ ID NO: 190 - DNA, 20 bp, synthetic construct
  source 1..20: mol_type = other DNA
cagccctcagttaactggtg

SEQ ID NO: 191 - DNA, 20 bp, synthetic construct
  source 1..20: mol_type = other DNA
acagccctcagttaactggt

SEQ ID NO: 192 - DNA, 20 bp, synthetic construct
  source 1..20: mol_type = other DNA
cacagccctcagttaactgg

SEQ ID NO: 193 - DNA, 20 bp, synthetic construct
  source 1..20: mol_type = other DNA
ccacagccctcagttaactg

SEQ ID NO: 194 - DNA, 20 bp, synthetic construct
  source 1..20: mol_type = other DNA
tccacagccctcagttaact

SEQ ID NO: 195 - DNA, 20 bp, synthetic construct
  source 1..20: mol_type = other DNA
ttccacagccctcagttaac

SEQ ID NO: 196 - DNA, 20 bp, synthetic construct
  source 1..20: mol_type = other DNA
ttccacagccctcagttgac

SEQ ID NO: 197 - DNA, 20 bp, synthetic construct
  source 1..20: mol_type = other DNA
ttccacagcgctcagttaac

SEQ ID NO: 198 - DNA, 20 bp, synthetic construct
  source 1..20: mol_type = other DNA
catttccacagccctcagtt

SEQ ID NO: 199 - DNA, 20 bp, synthetic construct
  source 1..20: mol_type = other DNA
tcatttccacagccctcagt

SEQ ID NO: 200 - DNA, 20 bp, synthetic construct
  source 1..20: mol_type = other DNA
caggcttcatttccacagcc

SEQ ID NO: 201 - DNA, 20 bp, synthetic construct
  source 1..20: mol_type = other DNA
gcaggcttcatttccacagc

SEQ ID NO: 202 - DNA, 20 bp, synthetic construct
  source 1..20: mol_type = other DNA
tgcaggcttcatttccacag

SEQ ID NO: 203 - DNA, 20 bp, synthetic construct
  source 1..20: mol_type = other DNA
gtgcaggcttcatttccaca

SEQ ID NO: 204 - DNA, 20 bp, synthetic construct
  source 1..20: mol_type = other DNA
cgtgcaggcttcatttccac

SEQ ID NO: 205 - DNA, 20 bp, synthetic construct
  source 1..20: mol_type = other DNA
tcgtgcaggcttcatttcca

SEQ ID NO: 206 - DNA, 20 bp, synthetic construct
  source 1..20: mol_type = other DNA
ttcgtgcaggcttcatttcc

SEQ ID NO: 207 - DNA, 20 bp, synthetic construct
  source 1..20: mol_type = other DNA
ctcattcgtgcaggcttcat

SEQ ID NO: 208 - DNA, 20 bp, synthetic construct
  source 1..20: mol_type = other DNA
caaaactcattcgtgcaggc

SEQ ID NO: 209 - DNA, 20 bp, synthetic construct
  source 1..20: mol_type = other DNA
ggacaggaagcacaaaactc

SEQ ID NO: 210 - DNA, 20 bp, synthetic construct
  source 1..20: mol_type = other DNA
tgcattaatcttataaagct

SEQ ID NO: 211 - DNA, 20 bp, synthetic construct
  source 1..20: mol_type = other DNA
gcttgctcctttcttggagg

SEQ ID NO: 212 - DNA, 20 bp, synthetic construct
  source 1..20: mol_type = other DNA
agcttgctcctttcttggag

SEQ ID NO: 213 - DNA, 20 bp, synthetic construct
  source 1..20: mol_type = other DNA
gagcttgctcctttcttgga

SEQ ID NO: 214 - DNA, 20 bp, synthetic construct
  source 1..20: mol_type = other DNA
tgagcttgctcctttcttgg

SEQ ID NO: 215 - DNA, 20 bp, synthetic construct
  source 1..20: mol_type = other DNA
ctgagcttgctcctttcttg

SEQ ID NO: 216 - DNA, 20 bp, synthetic construct
  source 1..20: mol_type = other DNA
gctgagcttgctcctttctt

SEQ ID NO: 217 - DNA, 20 bp, synthetic construct
  source 1..20: mol_type = other DNA
agctgagcttgctcctttct

SEQ ID NO: 218 - DNA, 20 bp, synthetic construct
  source 1..20: mol_type = other DNA
aagctgagcttgctcctttc

SEQ ID NO: 219 - DNA, 20 bp, synthetic construct
  source 1..20: mol_type = other DNA
gtaagctgagcttgctcctt

SEQ ID NO: 220 - DNA, 20 bp, synthetic construct
  source 1..20: mol_type = other DNA
ggtaagctgagcttgctcct

SEQ ID NO: 221 - DNA, 20 bp, synthetic construct
  source 1..20: mol_type = other DNA
aggtaagctgagcttgctcc

SEQ ID NO: 222 - DNA, 20 bp, synthetic construct
  source 1..20: mol_type = other DNA
aaggtaagctgagcttgctc

SEQ ID NO: 223 - DNA, 20 bp, synthetic construct
  source 1..20: mol_type = other DNA
caaggtaagctgagcttgct

SEQ ID NO: 224 - DNA, 20 bp, synthetic construct
  source 1..20: mol_type = other DNA
tcaaggtaagctgagcttgc

SEQ ID NO: 225 - DNA, 20 bp, synthetic construct
  source 1..20: mol_type = other DNA
cacctttcgagttctcaagg

SEQ ID NO: 226 - DNA, 20 bp, synthetic construct
  source 1..20: mol_type = other DNA
gcacctttcgagttctcaag

SEQ ID NO: 227 - DNA, 20 bp, synthetic construct
  source 1..20: mol_type = other DNA
aagtcacatctagaaaatca

SEQ ID NO: 228 - DNA, 20 bp, synthetic construct
  source 1..20: mol_type = other DNA
tctctacataattcaagaat

SEQ ID NO: 229 - DNA, 20 bp, synthetic construct
  source 1..20: mol_type = other DNA
gaaaaaactcttccaataac

SEQ ID NO: 230 - DNA, 20 bp, synthetic construct
  source 1..20: mol_type = other DNA
tctgtaccaatgcctcagca

SEQ ID NO: 231 - DNA, 20 bp, synthetic construct
  source 1..20: mol_type = other DNA
ctctgtaccaatgcctcagc

SEQ ID NO: 232 - DNA, 20 bp, synthetic construct
  source 1..20: mol_type = other DNA
gctctgtaccaatgcctcag

SEQ ID NO: 233 - DNA, 20 bp, synthetic construct
  source 1..20: mol_type = other DNA
aagctctgtaccaatgcctc

SEQ ID NO: 234 - DNA, 17 bp, synthetic construct
  source 1..17: mol_type = other DNA
gcgtaggcttaataact

SEQ ID NO: 235 - DNA, 17 bp, synthetic construct
  source 1..17: mol_type = other DNA
agcgtaggcttaataac

SEQ ID NO: 236 - DNA, 17 bp, synthetic construct
  source 1..17: mol_type = other DNA
gagcgtaggcttaataa

SEQ ID NO: 237 - DNA, 17 bp, synthetic construct
  source 1..17: mol_type = other DNA
tgagcgtaggcttaata

SEQ ID NO: 238 - DNA, 17 bp, synthetic construct
  source 1..17: mol_type = other DNA
ctgagcgtaggcttaat

SEQ ID NO: 239 - DNA, 17 bp, synthetic construct
  source 1..17: mol_type = other DNA
ctattagatgctttgca

SEQ ID NO: 240 - DNA, 17 bp, synthetic construct
  source 1..17: mol_type = other DNA
cgttctattagatgctt

SEQ ID NO: 241 - DNA, 17 bp, synthetic construct
  source 1..17: mol_type = other DNA
gcgttctattagatgct

SEQ ID NO: 242 - DNA, 17 bp, synthetic construct
  source 1..17: mol_type = other DNA
gtagcgttctattagat

SEQ ID NO: 243 - DNA, 17 bp, synthetic construct
  source 1..17: mol_type = other DNA
gtagtagcgttctatta

SEQ ID NO: 244 - DNA, 17 bp, synthetic construct
  source 1..17: mol_type = other DNA
ggtagtagcgttctatt

SEQ ID NO: 245 - DNA, 17 bp, synthetic construct
  source 1..17: mol_type = other DNA
tggtagtagcgttctat

SEQ ID NO: 246 - DNA, 17 bp, synthetic construct
  source 1..17: mol_type = other DNA
gtggtagtagcgttcta

SEQ ID NO: 247 - DNA, 17 bp, synthetic construct
  source 1..17: mol_type = other DNA
gttaactggtggtagta

SEQ ID NO: 248 - DNA, 17 bp, synthetic construct
  source 1..17: mol_type = other DNA
tcagttaactggtggta

SEQ ID NO: 249 - DNA, 17 bp, synthetic construct
  source 1..17: mol_type = other DNA
ggaagcacaaaactcat

SEQ ID NO: 250 - DNA, 17 bp, synthetic construct
  source 1..17: mol_type = other DNA
aggaagcacaaaactca

SEQ ID NO: 251 - DNA, 17 bp, synthetic construct
  source 1..17: mol_type = other DNA
gacaggaagcacaaaac

SEQ ID NO: 252 - DNA, 17 bp, synthetic construct
  source 1..17: mol_type = other DNA
agctcgagggctttaat

SEQ ID NO: 253 - DNA, 17 bp, synthetic construct
  source 1..17: mol_type = other DNA
aagctcgagggctttaa

SEQ ID NO: 254 - DNA, 17 bp, synthetic construct
  source 1..17: mol_type = other DNA
taaagctcgagggcttt

SEQ ID NO: 255 - DNA, 17 bp, synthetic construct
  source 1..17: mol_type = other DNA
ataaagctcgagggctt

SEQ ID NO: 256 - DNA, 17 bp, synthetic construct
  source 1..17: mol_type = other DNA
gagggatgaggatcaca

SEQ ID NO: 257 - DNA, 17 bp, synthetic construct
  source 1..17: mol_type = other DNA
cttggagggatgaggat

SEQ ID NO: 258 - DNA, 17 bp, synthetic construct
  source 1..17: mol_type = other DNA
acaccagtctagctgct

SEQ ID NO: 259 - DNA, 17 bp, synthetic construct
  source 1..17: mol_type = other DNA
gttgtcacaccagtcta

SEQ ID NO: 260 - DNA, 17 bp, synthetic construct
  source 1..17: mol_type = other DNA
ggttgtcacaccagtct

SEQ ID NO: 261 - DNA, 18 bp, synthetic construct
  source 1..18: mol_type = other DNA
aaaacaggttgtcacacc

SEQ ID NO: 262 - DNA, 18 bp, synthetic construct
  source 1..18: mol_type = other DNA
aaaaacaggttgtcacac

SEQ ID NO: 263 - DNA, 18 bp, synthetic construct
  source 1..18: mol_type = other DNA
tctattagatgctttgca

SEQ ID NO: 264 - DNA, 18 bp, synthetic construct
  source 1..18: mol_type = other DNA
gcgttctattagatgctt

SEQ ID NO: 265 - DNA, 18 bp, synthetic construct
  source 1..18: mol_type = other DNA
agcgttctattagatgct

SEQ ID NO: 266 - DNA, 18 bp, synthetic construct
  source 1..18: mol_type = other DNA
agtagcgttctattagat

SEQ ID NO: 267 - DNA, 18 bp, synthetic construct
  source 1..18: mol_type = other DNA
ggtagtagcgttctatta

SEQ ID NO: 268 - DNA, 18 bp, synthetic construct
  source 1..18: mol_type = other DNA
tggtagtagcgttctatt

SEQ ID NO: 269 - DNA, 18 bp, synthetic construct
  source 1..18: mol_type = other DNA
gtggtagtagcgttctat

SEQ ID NO: 270 - DNA, 18 bp, synthetic construct
  source 1..18: mol_type = other DNA
ttcgtgcaggcttcattt

SEQ ID NO: 271 - DNA, 18 bp, synthetic construct
  source 1..18: mol_type = other DNA
attcgtgcaggcttcatt

SEQ ID NO: 272 - DNA, 18 bp, synthetic construct
  source 1..18: mol_type = other DNA
ggagggatgaggatcaca

SEQ ID NO: 273 - DNA, 18 bp, synthetic construct
  source 1..18: mol_type = other DNA
ttggagggatgaggatca

SEQ ID NO: 274 - DNA, 18 bp, synthetic construct
  source 1..18: mol_type = other DNA
cttggagggatgaggatc

SEQ ID NO: 275 - DNA, 18 bp, synthetic construct
  source 1..18: mol_type = other DNA
ctcctttcttggagggat

SEQ ID NO: 276 - DNA, 20 bp, synthetic construct
  source 1..20: mol_type = other DNA
ttcgctgccgccaccgccgg

SEQ ID NO: 277 - DNA, 20 bp, synthetic construct
  source 1..20: mol_type = other DNA
tttcgctgccgccaccgccg

SEQ ID NO: 278 - DNA, 20 bp, synthetic construct
  source 1..20: mol_type = other DNA
ctttcgctgccgccaccgcc

SEQ ID NO: 279 - DNA, 20 bp, synthetic construct
  source 1..20: mol_type = other DNA
cgttctctttcgctgccgcc

SEQ ID NO: 280 - DNA, 17 bp, synthetic construct
  source 1..17: mol_type = other DNA
gattacagattacacat

SEQ ID NO: 281 - DNA, 18 bp, synthetic construct
  source 1..18: mol_type = other DNA
catcatcatcatcatcat

SEQ ID NO: 282 - DNA, 20 bp, synthetic construct
  source 1..20: mol_type = other DNA
acatcatcatcatcatcatc

SEQ ID NO: 283 - DNA, 20 bp, synthetic construct
  source 1..20: mol_type = other DNA
ggattcaactgctgtccttg

SEQ ID NO: 284 - DNA, 20 bp, synthetic construct
  source 1..20: mol_type = other DNA
tgagctatcacctatccttg

SEQ ID NO: 285 - DNA, 16 bp, synthetic construct
  source 1..16: mol_type = other DNA
  modified_base 1: mod_base = OTHER; note = Locked nucleic acid with phosphorothioate linkage
  modified_base 2: mod_base = OTHER; note = Locked nucleic acid with phosphorothioate linkage
  modified_base 3: mod_base = OTHER; note = Locked nucleic acid with phosphorothioate linkage
  modified_base 4: mod_base = OTHER; note = Nucleotide with phosphorothioate linkage
  modified_base 5: mod_base = OTHER; note = 5-methylcytosine with phosphorothioate linkage
  modified_base 6: mod_base = OTHER; note = Nucleotide with phosphorothioate linkage
  modified_base 7: mod_base = OTHER; note = Nucleotide with phosphorothioate linkage
  modified_base 8: mod_base = OTHER; note = Nucleotide with phosphorothioate linkage
  modified_base 9: mod_base = OTHER; note = Nucleotide with phosphorothioate linkage
  modified_base 10: mod_base = OTHER; note = Nucleotide with phosphorothioate linkage
  modified_base 11: mod_base = OTHER; note = 5-methylcytosine with phosphorothioate linkage
  modified_base 12: mod_base = OTHER; note = Nucleotide with phosphorothioate linkage
  modified_base 13: mod_base = OTHER; note = 5-methylcytosine with phosphorothioate linkage
  modified_base 14: mod_base = OTHER; note = Locked 5-methylcytosine with phosphorothioate linkage
  modified_base 15: mod_base = OTHER; note = Locked 5-methylcytosine with phosphorothioate linkage
  modified_base 16: mod_base = OTHER; note = Locked nucleic acid
tggtcgtagtcgccct

SEQ ID NO: 286 - DNA, 16 bp, synthetic construct
  source 1..16: mol_type = other DNA
  modified_base 1: mod_base = OTHER; note = Locked nucleic acid with phosphorothioate linkage
  modified_base 2: mod_base = OTHER; note = Locked 5-methylcytosine with phosphorothioate linkage
  modified_base 3: mod_base = OTHER; note = Locked nucleic acid with phosphorothioate linkage
  modified_base 4: mod_base = OTHER; note = Nucleotide with phosphorothioate linkage
  modified_base 5: mod_base = OTHER; note = Nucleotide with phosphorothioate linkage
  modified_base 6: mod_base = OTHER; note = Nucleotide with phosphorothioate linkage
  modified_base 7: mod_base = OTHER; note = 5-methylcytosine with phosphorothioate linkage
  modified_base 8: mod_base = OTHER; note = Nucleotide with phosphorothioate linkage
  modified_base 9: mod_base = OTHER; note = Nucleotide with phosphorothioate linkage
  modified_base 10: mod_base = OTHER; note = Nucleotide with phosphorothioate linkage
  modified_base 11: mod_base = OTHER; note = Nucleotide with phosphorothioate linkage
  modified_base 12: mod_base = OTHER; note = Nucleotide with phosphorothioate linkage
  modified_base 13: mod_base = OTHER; note = 5-methylcytosine with phosphorothioate linkage
  modified_base 14: mod_base = OTHER; note = Locked nucleic acid with phosphorothioate linkage
  modified_base 15: mod_base = OTHER; note = Locked 5-methylcytosine with phosphorothioate linkage
  modified_base 16: mod_base = OTHER; note = Locked 5-methylcytosine
actggtcgtagtcgcc

SEQ ID NO: 287 - DNA, 16 bp, synthetic construct
  source 1..16: mol_type = other DNA
  modified_base 1: mod_base = OTHER; note = Locked 5-methylcytosine with phosphorothioate linkage
  modified_base 2: mod_base = OTHER; note = Locked 5-methylcytosine with phosphorothioate linkage
  modified_base 3: mod_base = OTHER; note = Locked nucleic acid with phosphorothioate linkage
  modified_base 4: mod_base = OTHER; note = Nucleotide with phosphorothioate linkage
  modified_base 5: mod_base = OTHER; note = Nucleotide with phosphorothioate linkage
  modified_base 6: mod_base = OTHER; note = 5-methylcytosine with phosphorothioate linkage
  modified_base 7: mod_base = OTHER; note = Nucleotide with phosphorothioate linkage
  modified_base 8: mod_base = OTHER; note = Nucleotide with phosphorothioate linkage
  modified_base 9: mod_base = OTHER; note = Nucleotide with phosphorothioate linkage
  modified_base 10: mod_base = OTHER; note = 5-methylcytosine with phosphorothioate linkage
  modified_base 11: mod_base = OTHER; note = Nucleotide with phosphorothioate linkage
  modified_base 12: mod_base = OTHER; note = Nucleotide with phosphorothioate linkage
  modified_base 13: mod_base = OTHER; note = 5-methylcytosine with phosphorothioate linkage
  modified_base 14: mod_base = OTHER; note = Locked nucleic acid with phosphorothioate linkage
  modified_base 15: mod_base = OTHER; note = Locked nucleic acid with phosphorothioate linkage
  modified_base 16: mod_base = OTHER; note = Locked 5-methylcytosine
ccagtctagctgctac

SEQ ID NO: 288 - DNA, 16 bp, synthetic construct
  source 1..16: mol_type = other DNA
  modified_base 1: mod_base = OTHER; note = Locked nucleic acid with phosphorothioate linkage
  modified_base 2: mod_base = OTHER; note = Locked 5-methylcytosine with phosphorothioate linkage
  modified_base 3: mod_base = OTHER; note = Locked nucleic acid with phosphorothioate linkage
  modified_base 4: mod_base = OTHER; note = Nucleotide with phosphorothioate linkage
  modified_base 5: mod_base = OTHER; note = 5-methylcytosine with phosphorothioate linkage
  modified_base 6: mod_base = OTHER; note = Nucleotide with phosphorothioate linkage
  modified_base 7: mod_base = OTHER; note = Nucleotide with phosphorothioate linkage
  modified_base 8: mod_base = OTHER; note = Nucleotide with phosphorothioate linkage
  modified_base 9: mod_base = OTHER; note = Nucleotide with phosphorothioate linkage
  modified_base 10: mod_base = OTHER; note = Nucleotide with phosphorothioate linkage
  modified_base 11: mod_base = OTHER; note = Nucleotide with phosphorothioate linkage
  modified_base 12: mod_base = OTHER; note = Nucleotide with phosphorothioate linkage
  modified_base 13: mod_base = OTHER; note = Nucleotide with phosphorothioate linkage
  modified_base 14: mod_base = OTHER; note = Locked 5-methylcytosine with phosphorothioate linkage
  modified_base 15: mod_base = OTHER; note = Locked nucleic acid with phosphorothioate linkage
  modified_base 16: mod_base = OTHER; note = Locked 5-methylcytosine
acatcagggtgatcac

SEQ ID NO: 289 - DNA, 16 bp, synthetic construct
  source 1..16: mol_type = other DNA
  modified_base 1: mod_base = OTHER; note = Locked nucleic acid with phosphorothioate linkage
  modified_base 2: mod_base = OTHER; note = Locked 5-methylcytosine with phosphorothioate linkage
  modified_base 3: mod_base = OTHER; note = Locked 5-methylcytosine with phosphorothioate linkage
  modified_base 4: mod_base = OTHER; note = Nucleotide with phosphorothioate linkage
  modified_base 5: mod_base = OTHER; note = Nucleotide with phosphorothioate linkage
  modified_base 6: mod_base = OTHER; note = Nucleotide with phosphorothioate linkage
  modified_base 7: mod_base = OTHER; note = 5-methylcytosine with phosphorothioate linkage
  modified_base 8: mod_base = OTHER; note = Nucleotide with phosphorothioate linkage
  modified_base 9: mod_base = OTHER; note = Nucleotide with phosphorothioate linkage
  modified_base 10: mod_base = OTHER; note = Nucleotide with phosphorothioate linkage
  modified_base 11: mod_base = OTHER; note = Nucleotide with phosphorothioate linkage
  modified_base 12: mod_base = OTHER; note = Nucleotide with phosphorothioate linkage
  modified_base 13: mod_base = OTHER; note = 5-methylcytosine with phosphorothioate linkage
  modified_base 14: mod_base = OTHER; note = Locked nucleic acid with phosphorothioate linkage
  modified_base 15: mod_base = OTHER; note = Locked nucleic acid with phosphorothioate linkage
  modified_base 16: mod_base = OTHER; note = Locked 5-methylcytosine
gccattcggtgacatc

SEQ ID NO: 290 - DNA, 16 bp, synthetic construct
  source 1..16: mol_type = other DNA
  modified_base 1: mod_base = OTHER; note = Locked 5-methylcytosine with phosphorothioate linkage
  modified_base 2: mod_base = OTHER; note = Locked nucleic acid with phosphorothioate linkage
  modified_base 3: mod_base = OTHER; note = Locked nucleic acid with phosphorothioate linkage
  modified_base 4: mod_base = OTHER; note = Nucleotide with phosphorothioate linkage
  modified_base 5: mod_base = OTHER; note = 5-methylcytosine with phosphorothioate linkage
  modified_base 6: mod_base = OTHER; note = Nucleotide with phosphorothioate linkage
  modified_base 7: mod_base = OTHER; note = Nucleotide with phosphorothioate linkage
  modified_base 8: mod_base = OTHER; note = Nucleotide with phosphorothioate linkage
  modified_base 9: mod_base = OTHER; note = Nucleotide with phosphorothioate linkage
  modified_base 10: mod_base = OTHER; note = Nucleotide with phosphorothioate linkage
  modified_base 11: mod_base = OTHER; note = 5-methylcytosine with phosphorothioate linkage
  modified_base 12: mod_base = OTHER; note = 5-methylcytosine with phosphorothioate linkage
  modified_base 13: mod_base = OTHER; note = Nucleotide with phosphorothioate linkage
  modified_base 14: mod_base = OTHER; note = Locked nucleic acid with phosphorothioate linkage
  modified_base 15: mod_base = OTHER; note = Locked nucleic acid with phosphorothioate linkage
  modified_base 16: mod_base = OTHER; note = Locked 5-methylcytosine
caagctgtggccattc

SEQ ID NO: 291 - DNA, 16 bp, synthetic construct
  source 1..16: mol_type = other DNA
  modified_base 1: mod_base = OTHER; note = Locked nucleic acid with phosphorothioate linkage
  modified_base 2: mod_base = OTHER; note = Locked 5-methylcytosine with phosphorothioate linkage
  modified_base 3: mod_base = OTHER; note = Locked nucleic acid with phosphorothioate linkage
  modified_base 4: mod_base = OTHER; note = Nucleotide with phosphorothioate linkage
  modified_base 5: mod_base = OTHER; note = Nucleotide with phosphorothioate linkage
  modified_base 6: mod_base = OTHER; note = 5-methylcytosine with phosphorothioate linkage
  modified_base 7: mod_base = OTHER; note = Nucleotide with phosphorothioate linkage
  modified_base 8: mod_base = OTHER; note = Nucleotide with phosphorothioate linkage
  modified_base 9: mod_base = OTHER; note = Nucleotide with phosphorothioate linkage
  modified_base 10: mod_base = OTHER; note = Nucleotide with phosphorothioate linkage
  modified_base 11: mod_base = OTHER; note = Nucleotide with phosphorothioate linkage
  modified_base 12: mod_base = OTHER; note = 5-methylcytosine with phosphorothioate linkage
  modified_base 13: mod_base = OTHER; note = 5-methylcytosine with phosphorothioate linkage
  modified_base 14: mod_base = OTHER; note = Locked nucleic acid with phosphorothioate linkage
  modified_base 15: mod_base = OTHER; note = Locked nucleic acid with phosphorothioate linkage
  modified_base 16: mod_base = OTHER; note = Locked nucleic acid
acaagctgtggccatt

SEQ ID NO: 292 - DNA, 16 bp, synthetic construct
  source 1..16: mol_type = other DNA
  modified_base 1: mod_base = OTHER; note = Locked nucleic acid with phosphorothioate linkage
  modified_base 2: mod_base = OTHER; note = Locked 5-methylcytosine with phosphorothioate linkage
  modified_base 3: mod_base = OTHER; note = Locked nucleic acid with phosphorothioate linkage
  modified_base 4: mod_base = OTHER; note = Nucleotide with phosphorothioate linkage
  modified_base 5: mod_base = OTHER; note = Nucleotide with phosphorothioate linkage
  modified_base 6: mod_base = OTHER; note = Nucleotide with phosphorothioate linkage
  modified_base 7: mod_base = OTHER; note = 5-methylcytosine with phosphorothioate linkage
  modified_base 8: mod_base = OTHER; note = Nucleotide with phosphorothioate linkage
  modified_base 9: mod_base = OTHER; note = Nucleotide with phosphorothioate linkage
  modified_base 10: mod_base = OTHER; note = Nucleotide with phosphorothioate linkage
  modified_base 11: mod_base = OTHER; note = Nucleotide with phosphorothioate linkage
  modified_base 12: mod_base = OTHER; note = Nucleotide with phosphorothioate linkage
  modified_base 13: mod_base = OTHER; note = Nucleotide with phosphorothioate linkage
  modified_base 14: mod_base = OTHER; note = Locked nucleic acid with phosphorothioate linkage
  modified_base 15: mod_base = OTHER; note = Locked nucleic acid with phosphorothioate linkage
  modified_base 16: mod_base = OTHER; note = Locked nucleic acid
gcaaaacaaaaaataa

SEQ ID NO: 293 - DNA, 16 bp, synthetic construct
  source 1..16: mol_type = other DNA
  modified_base 1: mod_base = OTHER; note = Locked nucleic acid with phosphorothioate linkage
  modified_base 2: mod_base = OTHER; note = Locked nucleic acid with phosphorothioate linkage
  modified_base 3: mod_base = OTHER; note = Locked nucleic acid with phosphorothioate linkage
  modified_base 4: mod_base = OTHER; note = Nucleotide with phosphorothioate linkage
  modified_base 5: mod_base = OTHER; note = Nucleotide with phosphorothioate linkage
  modified_base 6: mod_base = OTHER; note = Nucleotide with phosphorothioate linkage
  modified_base 7: mod_base = OTHER; note = 5-methylcytosine with phosphorothioate linkage
  modified_base 8: mod_base = OTHER; note = 5-methylcytosine with phosphorothioate linkage
  modified_base 9: mod_base = OTHER; note = 5-methylcytosine with phosphorothioate linkage
  modified_base 10: mod_base = OTHER; note = 5-methylcytosine with phosphorothioate linkage
  modified_base 11: mod_base = OTHER; note = Nucleotide with phosphorothioate linkage
  modified_base 12: mod_base = OTHER; note = Nucleotide with phosphorothioate linkage
  modified_base 13: mod_base = OTHER; note = Nucleotide with phosphorothioate linkage
  modified_base 14: mod_base = OTHER; note = Locked nucleic acid with phosphorothioate linkage
  modified_base 15: mod_base = OTHER; note = Locked nucleic acid with phosphorothioate linkage
  modified_base 16: mod_base = OTHER; note = Locked nucleic acid
taagtaccccaagatt

SEQ ID NO: 294 - DNA, 16 bp, synthetic construct
  source 1..16: mol_type = other DNA
  modified_base 1: mod_base = OTHER; note = Locked 5-methylcytosine with phosphorothioate linkage
  modified_base 2: mod_base = OTHER; note = Locked 5-methylcytosine with phosphorothioate linkage
  modified_base 3: mod_base = OTHER; note = Locked nucleic acid with phosphorothioate linkage
  modified_base 4: mod_base = OTHER; note = 5-methylcytosine with phosphorothioate linkage
  modified_base 5: mod_base = OTHER; note = Nucleotide with phosphorothioate linkage
  modified_base 6: mod_base = OTHER; note = Nucleotide with phosphorothioate linkage
  modified_base 7: mod_base = OTHER; note = 5-methylcytosine with phosphorothioate linkage
  modified_base 8: mod_base = OTHER; note = 5-methylcytosine with phosphorothioate linkage
  modified_base 9: mod_base = OTHER; note = 5-methylcytosine with phosphorothioate linkage
  modified_base 10: mod_base = OTHER; note = Nucleotide with phosphorothioate linkage
  modified_base 11: mod_base = OTHER; note = 5-methylcytosine with phosphorothioate linkage
  modified_base 12: mod_base = OTHER; note = Nucleotide with phosphorothioate linkage
  modified_base 13: mod_base = OTHER; note = Nucleotide with phosphorothioate linkage
  modified_base 14: mod_base = OTHER; note = Locked nucleic acid with phosphorothioate linkage
  modified_base 15: mod_base = OTHER; note = Locked nucleic acid with phosphorothioate linkage
  modified_base 16: mod_base = OTHER; note = Locked nucleic acid
ccacagccctcagtta

SEQ ID NO: 295 - DNA, 16 bp, synthetic construct
  source 1..16: mol_type = other DNA
  modified_base 1: mod_base = OTHER; note = Locked nucleic acid with phosphorothioate linkage
  modified_base 2: mod_base = OTHER; note = Locked 5-methylcytosine with phosphorothioate linkage
  modified_base 3: mod_base = OTHER; note = Locked nucleic acid with phosphorothioate linkage
  modified_base 4: mod_base = OTHER; note = Nucleotide with phosphorothioate linkage
  modified_base 5: mod_base = OTHER; note = Nucleotide with phosphorothioate linkage
  modified_base 6: mod_base = OTHER; note = 5-methylcytosine with phosphorothioate linkage
  modified_base 7: mod_base = OTHER; note = Nucleotide with phosphorothioate linkage
  modified_base 8: mod_base = OTHER; note = Nucleotide with phosphorothioate linkage
  modified_base 9: mod_base = OTHER; note = Nucleotide with phosphorothioate linkage
  modified_base 10: mod_base = OTHER; note = 5-methylcytosine with phosphorothioate linkage
  modified_base 11: mod_base = OTHER; note = Nucleotide with phosphorothioate linkage
  modified_base 12: mod_base = OTHER; note = Nucleotide with phosphorothioate linkage
  modified_base 13: mod_base = OTHER; note = 5-methylcytosine with phosphorothioate linkage
  modified_base 14: mod_base = OTHER; note = Locked nucleic acid with phosphorothioate linkage
  modified_base 15: mod_base = OTHER; note = Locked nucleic acid with phosphorothioate linkage
  modified_base 16: mod_base = OTHER; note = Locked nucleic acid
tcgtgcaggcttcatt

SEQ ID NO: 296 - DNA, 17 bp, synthetic construct
  source 1..17: mol_type = other DNA
  modified_base 1: mod_base = OTHER; note = Locked 5-methylcytosine with phosphorothioate linkage
  modified_base 2: mod_base = OTHER; note = Locked nucleic acid with phosphorothioate linkage
  modified_base 3: mod_base = OTHER; note = Locked nucleic acid with phosphorothioate linkage
  modified_base 4: mod_base = OTHER; note = Nucleotide with phosphorothioate linkage
  modified_base 5: mod_base = OTHER; note = 5-methylcytosine with phosphorothioate linkage
  modified_base 6: mod_base = OTHER; note = Nucleotide with phosphorothioate linkage
  modified_base 7: mod_base = OTHER; note = 5-methylcytosine with phosphorothioate linkage
  modified_base 8: mod_base = OTHER; note = Nucleotide with phosphorothioate linkage
  modified_base 9: mod_base = OTHER; note = Nucleotide with phosphorothioate linkage
  modified_base 10: mod_base = OTHER; note = Nucleotide with phosphorothioate linkage
  modified_base 11: mod_base = OTHER; note = 5-methylcytosine with phosphorothioate linkage
  modified_base 12: mod_base = OTHER; note = Nucleotide with phosphorothioate linkage
  modified_base 13: mod_base = OTHER; note = 5-methylcytosine with phosphorothioate linkage
  modified_base 14: mod_base = OTHER; note = Nucleotide with phosphorothioate linkage
  modified_base 15: mod_base = OTHER; note = Locked nucleic acid with phosphorothioate linkage
  modified_base 16: mod_base = OTHER; note = Locked 5-methylcytosine with phosphorothioate linkage
  modified_base 17: mod_base = OTHER; note = Locked 5-methylcytosine
cgttctctttcgctgcc

SEQ ID NO: 297 - DNA, 17 bp, synthetic construct
  source 1..17: mol_type = other DNA
  modified_base 1: mod_base = OTHER; note = Locked nucleic acid with phosphorothioate linkage
  modified_base 2: mod_base = OTHER; note = Locked 5-methylcytosine with phosphorothioate linkage
  modified_base 3: mod_base = OTHER; note = Locked 5-methylcytosine with phosphorothioate linkage
  modified_base 4: mod_base = OTHER; note = Nucleotide with phosphorothioate linkage
  modified_base 5: mod_base = OTHER; note = 5-methylcytosine with phosphorothioate linkage
  modified_base 6: mod_base = OTHER; note = 5-methylcytosine with phosphorothioate linkage
  modified_base 7: mod_base = OTHER; note = Nucleotide with phosphorothioate linkage
  modified_base 8: mod_base = OTHER; note = 5-methylcytosine with phosphorothioate linkage
  modified_base 9: mod_base = OTHER; note = Nucleotide with phosphorothioate linkage
  modified_base 10: mod_base = OTHER; note = Nucleotide with phosphorothioate linkage
  modified_base 11: mod_base = OTHER; note = Nucleotide with phosphorothioate linkage
  modified_base 12: mod_base = OTHER; note = 5-methylcytosine with phosphorothioate linkage
  modified_base 13: mod_base = OTHER; note = Nucleotide with phosphorothioate linkage
  modified_base 14: mod_base = OTHER; note = 5-methylcytosine with phosphorothioate linkage
  modified_base 15: mod_base = OTHER; note = Locked nucleic acid with phosphorothioate linkage
  modified_base 16: mod_base = OTHER; note = Locked nucleic acid with phosphorothioate linkage
  modified_base 17: mod_base = OTHER; note = Locked nucleic acid
accgcctcgttctcttt

SEQ ID NO: 298 - DNA, 17 bp, synthetic construct
  source 1..17: mol_type = other DNA
  modified_base 1: mod_base = OTHER; note = Locked nucleic acid with phosphorothioate linkage
  modified_base 2: mod_base = OTHER; note = Locked nucleic acid with phosphorothioate linkage
  modified_base 3: mod_base = OTHER; note = Locked nucleic acid with phosphorothioate linkage
  modified_base 4: mod_base = OTHER; note = Nucleotide with phosphorothioate linkage
  modified_base 5: mod_base = OTHER; note = 5-methylcytosine with phosphorothioate linkage
  modified_base 6: mod_base = OTHER; note = Nucleotide with phosphorothioate linkage
  modified_base 7: mod_base = OTHER; note = Nucleotide with phosphorothioate linkage
  modified_base 8: mod_base = OTHER; note = Nucleotide with phosphorothioate linkage
  modified_base 9: mod_base = OTHER; note = Nucleotide with phosphorothioate linkage
  modified_base 10: mod_base = OTHER; note = Nucleotide with phosphorothioate linkage
  modified_base 11: mod_base = OTHER; note = 5-methylcytosine with phosphorothioate linkage
  modified_base 12: mod_base = OTHER; note = Nucleotide with phosphorothioate linkage
  modified_base 13: mod_base = OTHER; note = 5-methylcytosine with phosphorothioate linkage
  modified_base 14: mod_base = OTHER; note = 5-methylcytosine with phosphorothioate linkage
  modified_base 15: mod_base = OTHER; note = Locked 5-methylcytosine with phosphorothioate linkage
  modified_base 16: mod_base = OTHER; note = Locked nucleic acid with phosphorothioate linkage
  modified_base 17: mod_base = OTHER; note = Locked 5-methylcytosine
tggtcgtagtcgccctc

SEQ ID NO: 299 - DNA, 17 bp, synthetic construct
  source 1..17: mol_type = other DNA
  modified_base 1: mod_base = OTHER; note = Locked 5-methylcytosine with phosphorothioate linkage
  modified_base 2: mod_base = OTHER; note = Locked nucleic acid with phosphorothioate linkage
  modified_base 3: mod_base = OTHER; note = Locked nucleic acid with phosphorothioate linkage
  modified_base 4: mod_base = OTHER; note = Nucleotide with phosphorothioate linkage
  modified_base 5: mod_base = OTHER; note = Nucleotide with phosphorothioate linkage
  modified_base 6: mod_base = OTHER; note = 5-methylcytosine with phosphorothioate linkage
  modified_base 7: mod_base = OTHER; note = Nucleotide with phosphorothioate linkage
  modified_base 8: mod_base = OTHER; note = Nucleotide with phosphorothioate linkage
  modified_base 9: mod_base = OTHER; note = Nucleotide with phosphorothioate linkage
  modified_base 10: mod_base = OTHER; note = Nucleotide with phosphorothioate linkage
  modified_base 11: mod_base = OTHER; note = Nucleotide with phosphorothioate linkage
  modified_base 12: mod_base = OTHER; note = 5-methylcytosine with phosphorothioate linkage
  modified_base 13: mod_base = OTHER; note = Nucleotide with phosphorothioate linkage
  modified_base 14: mod_base = OTHER; note = 5-methylcytosine with phosphorothioate linkage
  modified_base 15: mod_base = OTHER; note = Locked 5-methylcytosine with phosphorothioate linkage
  modified_base 16: mod_base = OTHER; note = Locked 5-methylcytosine with phosphorothioate linkage
  modified_base 17: mod_base = OTHER; note = Locked nucleic acid
ctggtcgtagtcgccct

SEQ ID NO: 300 - DNA, 17 bp, synthetic construct
  source 1..17: mol_type = other DNA
  modified_base 1: mod_base = OTHER; note = Locked nucleic acid with phosphorothioate linkage
  modified_base 2: mod_base = OTHER; note = Locked 5-methylcytosine with phosphorothioate linkage
  modified_base 3: mod_base = OTHER; note = Locked nucleic acid with phosphorothioate linkage
  modified_base 4: mod_base = OTHER; note = Nucleotide with phosphorothioate linkage
  modified_base 5: mod_base = OTHER; note = Nucleotide with phosphorothioate linkage
  modified_base 6: mod_base = OTHER; note = Nucleotide with phosphorothioate linkage
  modified_base 7: mod_base = OTHER; note = 5-methylcytosine with phosphorothioate linkage
  modified_base 8: mod_base = OTHER; note = Nucleotide with phosphorothioate linkage
  modified_base 9: mod_base = OTHER; note = Nucleotide with phosphorothioate linkage
  modified_base 10: mod_base = OTHER; note = Nucleotide with phosphorothioate linkage
  modified_base 11: mod_base = OTHER; note = Nucleotide with phosphorothioate linkage
  modified_base 12: mod_base = OTHER; note = Nucleotide with phosphorothioate linkage
  modified_base 13: mod_base = OTHER; note = 5-methylcytosine with phosphorothioate linkage
  modified_base 14: mod_base = OTHER; note = Nucleotide with phosphorothioate linkage
  modified_base 15: mod_base = OTHER; note = Locked 5-methylcytosine with phosphorothioate linkage
  modified_base 16: mod_base = OTHER; note = Locked 5-methylcytosine with phosphorothioate linkage
  modified_base 17: mod_base = OTHER; note = Locked 5-methylcytosine
actggtcgtagtcgccc

SEQ ID NO: 301 - DNA, 17 bp, synthetic construct
  source 1..17: mol_type = other DNA
  modified_base 1: mod_base = OTHER; note = Locked 5-methylcytosine with phosphorothioate linkage
  modified_base 2: mod_base = OTHER; note = Locked nucleic acid with phosphorothioate linkage
  modified_base 3: mod_base = OTHER; note = Locked 5-methylcytosine with phosphorothioate linkage
  modified_base 4: mod_base = OTHER; note = Nucleotide with phosphorothioate linkage
  modified_base 5: mod_base = OTHER; note = Nucleotide with phosphorothioate linkage
  modified_base 6: mod_base = OTHER; note = Nucleotide with phosphorothioate linkage
  modified_base 7: mod_base = OTHER; note = Nucleotide with phosphorothioate linkage
  modified_base 8: mod_base = OTHER; note = 5-methylcytosine with phosphorothioate linkage
  modified_base 9: mod_base = OTHER; note = Nucleotide with phosphorothioate linkage
  modified_base 10: mod_base = OTHER; note = Nucleotide with phosphorothioate linkage
  modified_base 11: mod_base = OTHER; note = Nucleotide with phosphorothioate linkage
  modified_base 12: mod_base = OTHER; note = Nucleotide with phosphorothioate linkage
  modified_base 13: mod_base = OTHER; note = Nucleotide with phosphorothioate linkage
  modified_base 14: mod_base = OTHER; note = 5-methylcytosine with phosphorothioate linkage
  modified_base 15: mod_base = OTHER; note = Locked nucleic acid with phosphorothioate linkage
  modified_base 16: mod_base = OTHER; note = Locked 5-methylcytosine with phosphorothioate linkage
  modified_base 17: mod_base = OTHER; note = Locked 5-methylcytosine
cactggtcgtagtcgcc

SEQ ID NO: 302 - DNA, 17 bp, synthetic construct
  source 1..17: mol_type = other DNA
  modified_base 1: mod_base = OTHER; note = Locked 5-methylcytosine with phosphorothioate linkage
  modified_base 2: mod_base = OTHER; note = Locked nucleic acid with phosphorothioate linkage
  modified_base 3: mod_base = OTHER; note = Locked 5-methylcytosine with phosphorothioate linkage
  modified_base 4: mod_base = OTHER; note = Nucleotide with phosphorothioate linkage
  modified_base 5: mod_base = OTHER; note = Nucleotide with phosphorothioate linkage
  modified_base 6: mod_base = OTHER; note = Nucleotide with phosphorothioate linkage
  modified_base 7: mod_base = OTHER; note = 5-methylcytosine with phosphorothioate linkage
  modified_base 8: mod_base = OTHER; note = Nucleotide with phosphorothioate linkage
  modified_base 9: mod_base = OTHER; note = Nucleotide with phosphorothioate linkage
  modified_base 10: mod_base = OTHER; note = Nucleotide with phosphorothioate linkage
  modified_base 11: mod_base = OTHER; note = Nucleotide with phosphorothioate linkage
  modified_base 12: mod_base = OTHER; note = Nucleotide with phosphorothioate linkage
  modified_base 13: mod_base = OTHER; note = Nucleotide with phosphorothioate linkage
  modified_base 14: mod_base = OTHER; note = Nucleotide with phosphorothioate linkage
  modified_base 15: mod_base = OTHER; note = Locked nucleic acid with phosphorothioate linkage
  modified_base 16: mod_base = OTHER; note = Locked nucleic acid with phosphorothioate linkage
  modified_base 17: mod_base = OTHER; note = Locked nucleic acid
ctcttacagatttttaa

SEQ ID NO: 303 - DNA, 17 bp, synthetic construct
  source 1..17: mol_type = other DNA
  modified_base 1: mod_base = OTHER; note = Locked nucleic acid with phosphorothioate linkage
  modified_base 2: mod_base = OTHER; note = Locked nucleic acid with phosphorothioate linkage
  modified_base 3: mod_base = OTHER; note = Locked nucleic acid with phosphorothioate linkage
  modified_base 4: mod_base = OTHER; note = Nucleotide with phosphorothioate linkage
  modified_base 5: mod_base = OTHER; note = Nucleotide with phosphorothioate linkage
  modified_base 6: mod_base = OTHER; note = 5-methylcytosine with phosphorothioate linkage
  modified_base 7: mod_base = OTHER; note = Nucleotide with phosphorothioate linkage
  modified_base 8: mod_base = OTHER; note = Nucleotide with phosphorothioate linkage
  modified_base 9: mod_base = OTHER; note = Nucleotide with phosphorothioate linkage
  modified_base 10: mod_base = OTHER; note = 5-methylcytosine with phosphorothioate linkage
  modified_base 11: mod_base = OTHER; note = Nucleotide with phosphorothioate linkage
  modified_base 12: mod_base = OTHER; note = 5-methylcytosine with phosphorothioate linkage
  modified_base 13: mod_base = OTHER; note = Nucleotide with phosphorothioate linkage
  modified_base 14: mod_base = OTHER; note = Nucleotide with phosphorothioate linkage
  modified_base 15: mod_base = OTHER; note = Locked nucleic acid with phosphorothioate linkage
  modified_base 16: mod_base = OTHER; note = Locked 5-methylcytosine with phosphorothioate linkage
  modified_base 17: mod_base = OTHER; note = Locked nucleic acid
aaaatcaggctcttaca

SEQ ID NO: 304 - DNA, 17 bp, synthetic construct
  source 1..17: mol_type = other DNA
  modified_base 1: mod_base = OTHER; note = Locked nucleic acid with phosphorothioate linkage
  modified_base 2: mod_base = OTHER; note = Locked nucleic acid with phosphorothioate linkage
  modified_base 3: mod_base = OTHER; note = Locked nucleic acid with phosphorothioate linkage
  modified_base 4: mod_base = OTHER; note = 5-methylcytosine with phosphorothioate linkage
  modified_base 5: mod_base = OTHER; note = Nucleotide with phosphorothioate linkage
  modified_base 6: mod_base = OTHER; note = Nucleotide with phosphorothioate linkage
  modified_base 7: mod_base = OTHER; note = Nucleotide with phosphorothioate linkage
  modified_base 8: mod_base = OTHER; note = Nucleotide with phosphorothioate linkage
  modified_base 9: mod_base = OTHER; note = Nucleotide with phosphorothioate linkage
  modified_base 10: mod_base = OTHER; note = Nucleotide with phosphorothioate linkage
  modified_base 11: mod_base = OTHER; note = 5-methylcytosine with phosphorothioate linkage
  modified_base 12: mod_base = OTHER; note = Nucleotide with phosphorothioate linkage
  modified_base 13: mod_base = OTHER; note = Nucleotide with phosphorothioate linkage
  modified_base 14: mod_base = OTHER; note = Nucleotide with phosphorothioate linkage
  modified_base 15: mod_base = OTHER; note = Locked 5-methylcytosine with phosphorothioate linkage
  modified_base 16: mod_base = OTHER; note = Locked nucleic acid with phosphorothioate linkage
  modified_base 17: mod_base = OTHER; note = Locked 5-methylcytosine
attctaaaatcaggctc

SEQ ID NO: 305 - DNA, 17 bp, synthetic construct
  source 1..17: mol_type = other DNA
  modified_base 1: mod_base = OTHER; note = Locked nucleic acid with phosphorothioate linkage
  modified_base 2: mod_base = OTHER; note = Locked nucleic acid with phosphorothioate linkage
  modified_base 3: mod_base = OTHER; note = Locked nucleic acid with phosphorothioate linkage
  modified_base 4: mod_base = OTHER; note = Nucleotide with phosphorothioate linkage
  modified_base 5: mod_base = OTHER; note = Nucleotide with phosphorothioate linkage
  modified_base 6: mod_base = OTHER; note = Nucleotide with phosphorothioate linkage
  modified_base 7: mod_base = OTHER; note = 5-methylcytosine with phosphorothioate linkage
  modified_base 8: mod_base = OTHER; note = Nucleotide with phosphorothioate linkage
  modified_base 9: mod_base = OTHER; note = 5-methylcytosine with phosphorothioate linkage
  modified_base 10: mod_base = OTHER; note = 5-methylcytosine with phosphorothioate linkage
  modified_base 11: mod_base = OTHER; note = Nucleotide with phosphorothioate linkage
  modified_base 12: mod_base = OTHER; note = Nucleotide with phosphorothioate linkage
  modified_base 13: mod_base = OTHER; note = Nucleotide with phosphorothioate linkage
  modified_base 14: mod_base = OTHER; note = 5-methylcytosine with phosphorothioate linkage
  modified_base 15: mod_base = OTHER; note = Locked nucleic acid with phosphorothioate linkage
  modified_base 16: mod_base = OTHER; note = Locked nucleic acid with phosphorothioate linkage
  modified_base 17: mod_base = OTHER; note = Locked 5-methylcytosine
atatttcgccaaacttc

SEQ ID NO: 306 - DNA, 17 bp, synthetic construct
  source 1..17: mol_type = other DNA
  modified_base 1: mod_base = OTHER; note = Locked 5-methylcytosine with phosphorothioate linkage
  modified_base 2: mod_base = OTHER; note = Locked nucleic acid with phosphorothioate linkage
  modified_base 3: mod_base = OTHER; note = Locked nucleic acid with phosphorothioate linkage
  modified_base 4: mod_base = OTHER; note = Nucleotide with phosphorothioate linkage
  modified_base 5: mod_base = OTHER; note = Nucleotide with phosphorothioate linkage
  modified_base 6: mod_base = OTHER; note = Nucleotide with phosphorothioate linkage
  modified_base 7: mod_base = OTHER; note = 5-methylcytosine with phosphorothioate linkage
  modified_base 8: mod_base = OTHER; note = Nucleotide with phosphorothioate linkage
  modified_base 9: mod_base = OTHER; note = Nucleotide with phosphorothioate linkage
  modified_base 10: mod_base = OTHER; note = Nucleotide with phosphorothioate linkage
  modified_base 11: mod_base = OTHER; note = Nucleotide with phosphorothioate linkage
  modified_base 12: mod_base = OTHER; note = Nucleotide with phosphorothioate linkage
  modified_base 13: mod_base = OTHER; note = Nucleotide with phosphorothioate linkage
  modified_base 14: mod_base = OTHER; note = Nucleotide with phosphorothioate linkage
  modified_base 15: mod_base = OTHER; note = Locked 5-methylcytosine with phosphorothioate linkage
  modified_base 16: mod_base = OTHER; note = Locked nucleic acid with phosphorothioate linkage
  modified_base 17: mod_base = OTHER; note = Locked 5-methylcytosine
cgtaggcttaataactc

SEQ ID NO: 307 - DNA, 17 bp, synthetic construct
  source 1..17: mol_type = other DNA
  modified_base 1: mod_base = OTHER; note = Locked nucleic acid with phosphorothioate linkage
  modified_base 2: mod_base = OTHER; note = Locked 5-methylcytosine with phosphorothioate linkage
  modified_base 3: mod_base = OTHER; note = Locked nucleic acid with phosphorothioate linkage
  modified_base 4: mod_base = OTHER; note = Nucleotide with phosphorothioate linkage
  modified_base 5: mod_base = OTHER; note = Nucleotide with phosphorothioate linkage
  modified_base 6: mod_base = OTHER; note = Nucleotide with phosphorothioate linkage
  modified_base 7: mod_base = OTHER; note = 5-methylcytosine with phosphorothioate linkage
  modified_base 8: mod_base = OTHER; note = Nucleotide with phosphorothioate linkage
  modified_base 9: mod_base = OTHER; note = Nucleotide with phosphorothioate linkage
  modified_base 10: mod_base = OTHER; note = Nucleotide with phosphorothioate linkage
  modified_base 11: mod_base = OTHER; note = Nucleotide with phosphorothioate linkage
  modified_base 12: mod_base = OTHER; note = Nucleotide with phosphorothioate linkage
  modified_base 13: mod_base = OTHER; note = 5-methylcytosine with phosphorothioate linkage
  modified_base 14: mod_base = OTHER; note = Nucleotide with phosphorothioate linkage
  modified_base 15: mod_base = OTHER; note = Locked nucleic acid with phosphorothioate linkage
  modified_base 16: mod_base = OTHER; note = Locked nucleic acid with phosphorothioate linkage
  modified_base 17: mod_base = OTHER; note = Locked nucleic acid
tctgagcgtaggcttaa

SEQ ID NO: 308 - DNA, 17 bp, synthetic construct
  source 1..17: mol_type = other DNA
  modified_base 1: mod_base = OTHER; note = Locked 5-methylcytosine with phosphorothioate linkage
  modified_base 2: mod_base = OTHER; note = Locked nucleic acid with phosphorothioate linkage
  modified_base 3: mod_base = OTHER; note = Locked nucleic acid with phosphorothioate linkage
  modified_base 4: mod_base = OTHER; note = Nucleotide with phosphorothioate linkage
  modified_base 5: mod_base = OTHER; note = 5-methylcytosine with phosphorothioate linkage
  modified_base 6: mod_base = OTHER; note = Nucleotide with phosphorothioate linkage
  modified_base 7: mod_base = OTHER; note = Nucleotide with phosphorothioate linkage
  modified_base 8: mod_base = OTHER; note = 5-methylcytosine with phosphorothioate linkage
  modified_base 9: mod_base = OTHER; note = Nucleotide with phosphorothioate linkage
  modified_base 10: mod_base = OTHER; note = Nucleotide with phosphorothioate linkage
  modified_base 11: mod_base = OTHER; note = 5-methylcytosine with phosphorothioate linkage
  modified_base 12: mod_base = OTHER; note = 5-methylcytosine with phosphorothioate linkage
  modified_base 13: mod_base = OTHER; note = Nucleotide with phosphorothioate linkage
  modified_base 14: mod_base = OTHER; note = Nucleotide with phosphorothioate linkage
  modified_base 15: mod_base = OTHER; note = Locked nucleic acid with phosphorothioate linkage
  modified_base 16: mod_base = OTHER; note = Locked nucleic acid with phosphorothioate linkage
  modified_base 17: mod_base = OTHER; note = Locked nucleic acid
ctagctgctaccttgat

SEQ ID NO: 309 - DNA, 17 bp, synthetic construct
  source 1..17: mol_type = other DNA
  modified_base 1: mod_base = OTHER; note = Locked nucleic acid with phosphorothioate linkage
  modified_base 2: mod_base = OTHER; note = Locked nucleic acid with phosphorothioate linkage
  modified_base 3: mod_base = OTHER; note = Locked nucleic acid with phosphorothioate linkage
  modified_base 4: mod_base = OTHER; note = Nucleotide with phosphorothioate linkage
  modified_base 5: mod_base = OTHER; note = Nucleotide with phosphorothioate linkage
  modified_base 6: mod_base = OTHER; note = Nucleotide with phosphorothioate linkage
  modified_base 7: mod_base = OTHER; note = Nucleotide with phosphorothioate linkage
  modified_base 8: mod_base = OTHER; note = 5-methylcytosine with phosphorothioate linkage
  modified_base 9: mod_base = OTHER; note = Nucleotide with phosphorothioate linkage
  modified_base 10: mod_base = OTHER; note = 5-methylcytosine with phosphorothioate linkage
  modified_base 11: mod_base = OTHER; note = Nucleotide with phosphorothioate linkage
  modified_base 12: mod_base = OTHER; note = 5-methylcytosine with phosphorothioate linkage
  modified_base 13: mod_base = OTHER; note = 5-methylcytosine with phosphorothioate linkage
  modified_base 14: mod_base = OTHER; note = Nucleotide with phosphorothioate linkage
  modified_base 15: mod_base = OTHER; note = Locked nucleic acid with phosphorothioate linkage
  modified_base 16: mod_base = OTHER; note = Locked nucleic acid with phosphorothioate linkage
  modified_base 17: mod_base = OTHER; note = Locked 5-methylcytosine
aggttgtcacaccagtc

SEQ ID NO: 310 - DNA, 17 bp, synthetic construct
  source 1..17: mol_type = other DNA
  modified_base 1: mod_base = OTHER; note = Locked nucleic acid with phosphorothioate linkage
  modified_base 2: mod_base = OTHER; note = Locked nucleic acid with phosphorothioate linkage
  modified_base 3: mod_base = OTHER; note = Locked 5-methylcytosine with phosphorothioate linkage
  modified_base 4: mod_base = OTHER; note = Nucleotide with phosphorothioate linkage
  modified_base 5: mod_base = OTHER; note = Nucleotide with phosphorothioate linkage
  modified_base 6: mod_base = OTHER; note = Nucleotide with phosphorothioate linkage
  modified_base 7: mod_base = OTHER; note = Nucleotide with phosphorothioate linkage
  modified_base 8: mod_base = OTHER; note = Nucleotide with phosphorothioate linkage
  modified_base 9: mod_base = OTHER; note = Nucleotide with phosphorothioate linkage
  modified_base 10: mod_base = OTHER; note = Nucleotide with phosphorothioate linkage
  modified_base 11: mod_base = OTHER; note = 5-methylcytosine with phosphorothioate linkage
  modified_base 12: mod_base = OTHER; note = Nucleotide with phosphorothioate linkage
  modified_base 13: mod_base = OTHER; note = 5-methylcytosine with phosphorothioate linkage
  modified_base 14: mod_base = OTHER; note = Nucleotide with phosphorothioate linkage
  modified_base 15: mod_base = OTHER; note = Locked 5-methylcytosine with phosphorothioate linkage
  modified_base 16: mod_base = OTHER; note = Locked 5-methylcytosine with phosphorothioate linkage
  modified_base 17: mod_base = OTHER; note = Locked nucleic acid
aacaggttgtcacacca

SEQ ID NO: 311 - DNA, 17 bp, synthetic construct
  source 1..17: mol_type = other DNA
  modified_base 1: mod_base = OTHER; note = Locked nucleic acid with phosphorothioate linkage
  modified_base 2: mod_base = OTHER; note = Locked nucleic acid with phosphorothioate linkage
  modified_base 3: mod_base = OTHER; note = Locked nucleic acid with phosphorothioate linkage
  modified_base 4: mod_base = OTHER; note = 5-methylcytosine with phosphorothioate linkage
  modified_base 5: mod_base = OTHER; note = Nucleotide with phosphorothioate linkage
  modified_base 6: mod_base = OTHER; note = Nucleotide with phosphorothioate linkage
  modified_base 7: mod_base = OTHER; note = Nucleotide with phosphorothioate linkage
  modified_base 8: mod_base = OTHER; note = Nucleotide with phosphorothioate linkage
  modified_base 9: mod_base = OTHER; note = Nucleotide with phosphorothioate linkage
  modified_base 10: mod_base = OTHER; note = Nucleotide with phosphorothioate linkage
  modified_base 11: mod_base = OTHER; note = Nucleotide with phosphorothioate linkage
  modified_base 12: mod_base = OTHER; note = 5-methylcytosine with phosphorothioate linkage
  modified_base 13: mod_base = OTHER; note = Nucleotide with phosphorothioate linkage
  modified_base 14: mod_base = OTHER; note = 5-methylcytosine with phosphorothioate linkage
  modified_base 15: mod_base = OTHER; note = Locked nucleic acid with phosphorothioate linkage
  modified_base 16: mod_base = OTHER; note = Locked 5-methylcytosine with phosphorothioate linkage
  modified_base 17: mod_base = OTHER; note = Locked 5-methylcytosine
aaacaggttgtcacacc

SEQ ID NO: 312 - DNA, 17 bp, synthetic construct
  source 1..17: mol_type = other DNA
  modified_base 1: mod_base = OTHER; note = Locked nucleic acid with phosphorothioate linkage
  modified_base 2: mod_base = OTHER; note = Locked nucleic acid with phosphorothioate linkage
  modified_base 3: mod_base = OTHER; note = Locked 5-methylcytosine with phosphorothioate linkage
  modified_base 4: mod_base = OTHER; note = Nucleotide with phosphorothioate linkage
  modified_base 5: mod_base = OTHER; note = Nucleotide with phosphorothioate linkage
  modified_base 6: mod_base = OTHER; note = Nucleotide with phosphorothioate linkage
  modified_base 7: mod_base = OTHER; note = Nucleotide with phosphorothioate linkage
  modified_base 8: mod_base = OTHER; note = Nucleotide with phosphorothioate linkage
  modified_base 9: mod_base = OTHER; note = Nucleotide with phosphorothioate linkage
  modified_base 10: mod_base = OTHER; note = Nucleotide with phosphorothioate linkage
  modified_base 11: mod_base = OTHER; note = 5-methylcytosine with phosphorothioate linkage
  modified_base 12: mod_base = OTHER; note = Nucleotide with phosphorothioate linkage
  modified_base 13: mod_base = OTHER; note = 5-methylcytosine with phosphorothioate linkage
  modified_base 14: mod_base = OTHER; note = Nucleotide with phosphorothioate linkage
  modified_base 15: mod_base = OTHER; note = Locked nucleic acid with phosphorothioate linkage
  modified_base 16: mod_base = OTHER; note = Locked nucleic acid with phosphorothioate linkage
  modified_base 17: mod_base = OTHER; note = Locked nucleic acid
agctttgagtcactgat

SEQ ID NO: 313 - DNA, 17 bp, synthetic construct
  source 1..17: mol_type = other DNA
  modified_base 1: mod_base = OTHER; note = Locked nucleic acid with phosphorothioate linkage
  modified_base 2: mod_base = OTHER; note = Locked 5-methylcytosine with phosphorothioate linkage
  modified_base 3: mod_base = OTHER; note = Locked 5-methylcytosine with phosphorothioate linkage
  modified_base 4: mod_base = OTHER; note = Nucleotide with phosphorothioate linkage
  modified_base 5: mod_base = OTHER; note = Nucleotide with phosphorothioate linkage
  modified_base 6: mod_base = OTHER; note = Nucleotide with phosphorothioate linkage
  modified_base 7: mod_base = OTHER; note = 5-methylcytosine with phosphorothioate linkage
  modified_base 8: mod_base = OTHER; note = Nucleotide with phosphorothioate linkage
  modified_base 9: mod_base = OTHER; note = Nucleotide with phosphorothioate linkage
  modified_base 10: mod_base = OTHER; note = Nucleotide with phosphorothioate linkage
  modified_base 11: mod_base = OTHER; note = Nucleotide with phosphorothioate linkage
  modified_base 12: mod_base = OTHER; note = Nucleotide with phosphorothioate linkage
  modified_base 13: mod_base = OTHER; note = 5-methylcytosine with phosphorothioate linkage
  modified_base 14: mod_base = OTHER; note = Nucleotide with phosphorothioate linkage
  modified_base 15: mod_base = OTHER; note = Locked nucleic acid with phosphorothioate linkage
  modified_base 16: mod_base = OTHER; note = Locked 5-methylcytosine with phosphorothioate linkage
  modified_base 17: mod_base = OTHER; note = Locked nucleic acid
gccattcggtgacatca

SEQ ID NO: 314 - DNA, 17 bp, synthetic construct
  source 1..17: mol_type = other DNA
  modified_base 1: mod_base = OTHER; note = Locked nucleic acid with phosphorothioate linkage
  modified_base 2: mod_base = OTHER; note = Locked nucleic acid with phosphorothioate linkage
  modified_base 3: mod_base = OTHER; note = Locked 5-methylcytosine with phosphorothioate linkage
  modified_base 4: mod_base = OTHER; note = 5-methylcytosine with phosphorothioate linkage
  modified_base 5: mod_base = OTHER; note = Nucleotide with phosphorothioate linkage
  modified_base 6: mod_base = OTHER; note = Nucleotide with phosphorothioate linkage
  modified_base 7: mod_base = OTHER; note = Nucleotide with phosphorothioate linkage
  modified_base 8: mod_base = OTHER; note = 5-methylcytosine with phosphorothioate linkage
  modified_base 9: mod_base = OTHER; note = Nucleotide with phosphorothioate linkage
  modified_base 10: mod_base = OTHER; note = Nucleotide with phosphorothioate linkage
  modified_base 11: mod_base = OTHER; note = Nucleotide with phosphorothioate linkage
  modified_base 12: mod_base = OTHER; note = Nucleotide with phosphorothioate linkage
  modified_base 13: mod_base = OTHER; note = Nucleotide with phosphorothioate linkage
  modified_base 14: mod_base = OTHER; note = 5-methylcytosine with phosphorothioate linkage
  modified_base 15: mod_base = OTHER; note = Locked nucleic acid with phosphorothioate linkage
  modified_base 16: mod_base = OTHER; note = Locked nucleic acid with phosphorothioate linkage
  modified_base 17: mod_base = OTHER; note = Locked 5-methylcytosine
ggccattcggtgacatc

SEQ ID NO: 315 - DNA, 17 bp, synthetic construct
  source 1..17: mol_type = other DNA
  modified_base 1: mod_base = OTHER; note = Locked nucleic acid with phosphorothioate linkage
  modified_base 2: mod_base = OTHER; note = Locked 5-methylcytosine with phosphorothioate linkage
  modified_base 3: mod_base = OTHER; note = Locked nucleic acid with phosphorothioate linkage
  modified_base 4: mod_base = OTHER; note = Nucleotide with phosphorothioate linkage
  modified_base 5: mod_base = OTHER; note = Nucleotide with phosphorothioate linkage
  modified_base 6: mod_base = OTHER; note = 5-methylcytosine with phosphorothioate linkage
  modified_base 7: mod_base = OTHER; note = Nucleotide with phosphorothioate linkage
  modified_base 8: mod_base = OTHER; note = Nucleotide with phosphorothioate linkage
  modified_base 9: mod_base = OTHER; note = Nucleotide with phosphorothioate linkage
  modified_base 10: mod_base = OTHER; note = Nucleotide with phosphorothioate linkage
  modified_base 11: mod_base = OTHER; note = Nucleotide with phosphorothioate linkage
  modified_base 12: mod_base = OTHER; note = 5-methylcytosine with phosphorothioate linkage
  modified_base 13: mod_base = OTHER; note = 5-methylcytosine with phosphorothioate linkage
  modified_base 14: mod_base = OTHER; note = Nucleotide with phosphorothioate linkage
  modified_base 15: mod_base = OTHER; note = Locked nucleic acid with phosphorothioate linkage
  modified_base 16: mod_base = OTHER; note = Locked nucleic acid with phosphorothioate linkage
  modified_base 17: mod_base = OTHER; note = Locked 5-methylcytosine
acaagctgtggccattc

SEQ ID NO: 316 - DNA, 17 bp, synthetic construct
  source 1..17: mol_type = other DNA
  modified_base 1: mod_base = OTHER; note = Locked nucleic acid with phosphorothioate linkage
  modified_base 2: mod_base = OTHER; note = Locked nucleic acid with phosphorothioate linkage
  modified_base 3: mod_base = OTHER; note = Locked 5-methylcytosine with phosphorothioate linkage
  modified_base 4: mod_base = OTHER; note = Nucleotide with phosphorothioate linkage
  modified_base 5: mod_base = OTHER; note = Nucleotide with phosphorothioate linkage
  modified_base 6: mod_base = OTHER; note = Nucleotide with phosphorothioate linkage
  modified_base 7: mod_base = OTHER; note = 5-methylcytosine with phosphorothioate linkage
  modified_base 8: mod_base = OTHER; note = Nucleotide with phosphorothioate linkage
  modified_base 9: mod_base = OTHER; note = Nucleotide with phosphorothioate linkage
  modified_base 10: mod_base = OTHER; note = Nucleotide with phosphorothioate linkage
  modified_base 11: mod_base = OTHER; note = Nucleotide with phosphorothioate linkage
  modified_base 12: mod_base = OTHER; note = Nucleotide with phosphorothioate linkage
  modified_base 13: mod_base = OTHER; note = 5-methylcytosine with phosphorothioate linkage
  modified_base 14: mod_base = OTHER; note = 5-methylcytosine with phosphorothioate linkage
  modified_base 15: mod_base = OTHER; note = Locked nucleic acid with phosphorothioate linkage
  modified_base 16: mod_base = OTHER; note = Locked nucleic acid with phosphorothioate linkage
  modified_base 17: mod_base = OTHER; note = Locked nucleic acid
tacaagctgtggccatt

SEQ ID NO: 317 - DNA, 17 bp, synthetic construct
  source 1..17: mol_type = other DNA
  modified_base 1: mod_base = OTHER; note = Locked nucleic acid with phosphorothioate linkage
  modified_base 2: mod_base = OTHER; note = Locked nucleic acid with phosphorothioate linkage
  modified_base 3: mod_base = OTHER; note = Locked nucleic acid with phosphorothioate linkage
  modified_base 4: mod_base = OTHER; note = 5-methylcytosine with phosphorothioate linkage
  modified_base 5: mod_base = OTHER; note = Nucleotide with phosphorothioate linkage
  modified_base 6: mod_base = OTHER; note = Nucleotide with phosphorothioate linkage
  modified_base 7: mod_base = OTHER; note = Nucleotide with phosphorothioate linkage
  modified_base 8: mod_base = OTHER; note = 5-methylcytosine with phosphorothioate linkage
  modified_base 9: mod_base = OTHER; note = Nucleotide with phosphorothioate linkage
  modified_base 10: mod_base = OTHER; note = Nucleotide with phosphorothioate linkage
  modified_base 11: mod_base = OTHER; note = Nucleotide with phosphorothioate linkage
  modified_base 12: mod_base = OTHER; note = Nucleotide with phosphorothioate linkage
  modified_base 13: mod_base = OTHER; note = Nucleotide with phosphorothioate linkage
  modified_base 14: mod_base = OTHER; note = 5-methylcytosine with phosphorothioate linkage
  modified_base 15: mod_base = OTHER; note = Locked 5-methylcytosine with phosphorothioate linkage
  modified_base 16: mod_base = OTHER; note = Locked nucleic acid with phosphorothioate linkage
  modified_base 17: mod_base = OTHER; note = Locked nucleic acid
ttacaagctgtggccat

SEQ ID NO: 318 - DNA, 17 bp, synthetic construct
  source 1..17: mol_type = other DNA
  modified_base 1: mod_base = OTHER; note = Locked nucleic acid with phosphorothioate linkage
  modified_base 2: mod_base = OTHER; note = Locked nucleic acid with phosphorothioate linkage
  modified_base 3: mod_base = OTHER; note = Locked nucleic acid with phosphorothioate linkage
  modified_base 4: mod_base = OTHER; note = Nucleotide with phosphorothioate linkage
  modified_base 5: mod_base = OTHER; note = 5-methylcytosine with phosphorothioate linkage
  modified_base 6: mod_base = OTHER; note = Nucleotide with phosphorothioate linkage
  modified_base 7: mod_base = OTHER; note = Nucleotide with phosphorothioate linkage
  modified_base 8: mod_base = OTHER; note = Nucleotide with phosphorothioate linkage
  modified_base 9: mod_base = OTHER; note = 5-methylcytosine with phosphorothioate linkage
  modified_base 10: mod_base = OTHER; note = Nucleotide with phosphorothioate linkage
  modified_base 11: mod_base = OTHER; note = Nucleotide with phosphorothioate linkage
  modified_base 12: mod_base = OTHER; note = Nucleotide with phosphorothioate linkage
  modified_base 13: mod_base = OTHER; note = Nucleotide with phosphorothioate linkage
  modified_base 14: mod_base = OTHER; note = Nucleotide with phosphorothioate linkage
  modified_base 15: mod_base = OTHER; note = Locked 5-methylcytosine with phosphorothioate linkage
  modified_base 16: mod_base = OTHER; note = Locked 5-methylcytosine with phosphorothioate linkage
  modified_base 17: mod_base = OTHER; note = Locked nucleic acid
tttacaagctgtggcca

SEQ ID NO: 319 - DNA, 17 bp, synthetic construct
  source 1..17: mol_type = other DNA
  modified_base 1: mod_base = OTHER; note = Locked nucleic acid with phosphorothioate linkage
  modified_base 2: mod_base = OTHER; note = Locked nucleic acid with phosphorothioate linkage
  modified_base 3: mod_base = OTHER; note = Locked nucleic acid with phosphorothioate linkage
  modified_base 4: mod_base = OTHER; note = Nucleotide with phosphorothioate linkage
  modified_base 5: mod_base = OTHER; note = Nucleotide with phosphorothioate linkage
  modified_base 6: mod_base = OTHER; note = 5-methylcytosine with phosphorothioate linkage
  modified_base 7: mod_base = OTHER; note = Nucleotide with phosphorothioate linkage
  modified_base 8: mod_base = OTHER; note = Nucleotide with phosphorothioate linkage
  modified_base 9: mod_base = OTHER; note = Nucleotide with phosphorothioate linkage
  modified_base 10: mod_base = OTHER; note = 5-methylcytosine with phosphorothioate linkage
  modified_base 11: mod_base = OTHER; note = Nucleotide with phosphorothioate linkage
  modified_base 12: mod_base = OTHER; note = Nucleotide with phosphorothioate linkage
  modified_base 13: mod_base = OTHER; note = Nucleotide with phosphorothioate linkage
  modified_base 14: mod_base = OTHER; note = Nucleotide with phosphorothioate linkage
  modified_base 15: mod_base = OTHER; note = Locked nucleic acid with phosphorothioate linkage
  modified_base 16: mod_base = OTHER; note = Locked 5-methylcytosine with phosphorothioate linkage
  modified_base 17: mod_base = OTHER; note = Locked 5-methylcytosine
ttttacaagctgtggcc

SEQ ID NO: 320 - DNA, 17 bp, synthetic construct
  source 1..17: mol_type = other DNA
  modified_base 1: mod_base = OTHER; note = Locked 5-methylcytosine with phosphorothioate linkage
  modified_base 2: mod_base = OTHER; note = Locked nucleic acid with phosphorothioate linkage
  modified_base 3: mod_base = OTHER; note = Locked nucleic acid with phosphorothioate linkage
  modified_base 4: mod_base = OTHER; note = 5-methylcytosine with phosphorothioate linkage
  modified_base 5: mod_base = OTHER; note = Nucleotide with phosphorothioate linkage
  modified_base 6: mod_base = OTHER; note = Nucleotide with phosphorothioate linkage
  modified_base 7: mod_base = OTHER; note = Nucleotide with phosphorothioate linkage
  modified_base 8: mod_base = OTHER; note = 5-methylcytosine with phosphorothioate linkage
  modified_base 9: mod_base = OTHER; note = Nucleotide with phosphorothioate linkage
  modified_base 10: mod_base = OTHER; note = Nucleotide with phosphorothioate linkage
  modified_base 11: mod_base = OTHER; note = Nucleotide with phosphorothioate linkage
  modified_base 12: mod_base = OTHER; note = Nucleotide with phosphorothioate linkage
  modified_base 13: mod_base = OTHER; note = Nucleotide with phosphorothioate linkage
  modified_base 14: mod_base = OTHER; note = Nucleotide with phosphorothioate linkage
  modified_base 15: mod_base = OTHER; note = Locked nucleic acid with phosphorothioate linkage
  modified_base 16: mod_base = OTHER; note = Locked 5-methylcytosine with phosphorothioate linkage
  modified_base 17: mod_base = OTHER; note = Locked nucleic acid
cgtcagactgaggttct

SEQ ID NO: 321 - DNA, 17 bp, synthetic construct
  source 1..17: mol_type = other DNA
  modified_base 1: mod_base = OTHER; note = Locked nucleic acid with phosphorothioate linkage
  modified_base 2: mod_base = OTHER; note = Locked nucleic acid with phosphorothioate linkage
  modified_base 3: mod_base = OTHER; note = Locked 5-methylcytosine with phosphorothioate linkage
  modified_base 4: mod_base = OTHER; note = Nucleotide with phosphorothioate linkage
  modified_base 5: mod_base = OTHER; note = Nucleotide with phosphorothioate linkage
  modified_base 6: mod_base = OTHER; note = 5-methylcytosine with phosphorothioate linkage
  modified_base 7: mod_base = OTHER; note = Nucleotide with phosphorothioate linkage
  modified_base 8: mod_base = OTHER; note = Nucleotide with phosphorothioate linkage
  modified_base 9: mod_base = OTHER; note = Nucleotide with phosphorothioate linkage
  modified_base 10: mod_base = OTHER; note = 5-methylcytosine with phosphorothioate linkage
  modified_base 11: mod_base = OTHER; note = Nucleotide with phosphorothioate linkage
  modified_base 12: mod_base = OTHER; note = Nucleotide with phosphorothioate linkage
  modified_base 13: mod_base = OTHER; note = Nucleotide with phosphorothioate linkage
  modified_base 14: mod_base = OTHER; note = Nucleotide with phosphorothioate linkage
  modified_base 15: mod_base = OTHER; note = Locked nucleic acid with phosphorothioate linkage
  modified_base 16: mod_base = OTHER; note = Locked nucleic acid with phosphorothioate linkage
  modified_base 17: mod_base = OTHER; note = Locked nucleic acid
gtcgtcagactgaggtt

SEQ ID NO: 322 - DNA, 17 bp, synthetic construct
  source 1..17: mol_type = other DNA
  modified_base 1: mod_base = OTHER; note = Locked nucleic acid with phosphorothioate linkage
  modified_base 2: mod_base = OTHER; note = Locked nucleic acid with phosphorothioate linkage
  modified_base 3: mod_base = OTHER; note = Locked nucleic acid with phosphorothioate linkage
  modified_base 4: mod_base = OTHER; note = 5-methylcytosine with phosphorothioate linkage
  modified_base 5: mod_base = OTHER; note = Nucleotide with phosphorothioate linkage
  modified_base 6: mod_base = OTHER; note = Nucleotide with phosphorothioate linkage
  modified_base 7: mod_base = OTHER; note = 5-methylcytosine with phosphorothioate linkage
  modified_base 8: mod_base = OTHER; note = Nucleotide with phosphorothioate linkage
  modified_base 9: mod_base = OTHER; note = Nucleotide with phosphorothioate linkage
  modified_base 10: mod_base = OTHER; note = Nucleotide with phosphorothioate linkage
  modified_base 11: mod_base = OTHER; note = Nucleotide with phosphorothioate linkage
  modified_base 12: mod_base = OTHER; note = Nucleotide with phosphorothioate linkage
  modified_base 13: mod_base = OTHER; note = 5-methylcytosine with phosphorothioate linkage
  modified_base 14: mod_base = OTHER; note = Nucleotide with phosphorothioate linkage
  modified_base 15: mod_base = OTHER; note = Locked nucleic acid with phosphorothioate linkage
  modified_base 16: mod_base = OTHER; note = Locked 5-methylcytosine with phosphorothioate linkage
  modified_base 17: mod_base = OTHER; note = Locked nucleic acid
tagcttcaatgtcgtca

SEQ ID NO: 323 - DNA, 17 bp, synthetic construct
  source 1..17: mol_type = other DNA
  modified_base 1: mod_base = OTHER; note = Locked 5-methylcytosine with phosphorothioate linkage
  modified_base 2: mod_base = OTHER; note = Locked nucleic acid with phosphorothioate linkage
  modified_base 3: mod_base = OTHER; note = Locked nucleic acid with phosphorothioate linkage
  modified_base 4: mod_base = OTHER; note = 5-methylcytosine with phosphorothioate linkage
  modified_base 5: mod_base = OTHER; note = Nucleotide with phosphorothioate linkage
  modified_base 6: mod_base = OTHER; note = Nucleotide with phosphorothioate linkage
  modified_base 7: mod_base = OTHER; note = Nucleotide with phosphorothioate linkage
  modified_base 8: mod_base = OTHER; note = 5-methylcytosine with phosphorothioate linkage
  modified_base 9: mod_base = OTHER; note = Nucleotide with phosphorothioate linkage
  modified_base 10: mod_base = OTHER; note = Nucleotide with phosphorothioate linkage
  modified_base 11: mod_base = OTHER; note = 5-methylcytosine with phosphorothioate linkage
  modified_base 12: mod_base = OTHER; note = Nucleotide with phosphorothioate linkage
  modified_base 13: mod_base = OTHER; note = Nucleotide with phosphorothioate linkage
  modified_base 14: mod_base = OTHER; note = Nucleotide with phosphorothioate linkage
  modified_base 15: mod_base = OTHER; note = Locked nucleic acid with phosphorothioate linkage
  modified_base 16: mod_base = OTHER; note = Locked nucleic acid with phosphorothioate linkage
  modified_base 17: mod_base = OTHER; note = Locked 5-methylcytosine
cggctagcttcaatgtc

SEQ ID NO: 324 - DNA, 17 bp, synthetic construct
  source 1..17: mol_type = other DNA
  modified_base 1: mod_base = OTHER; note = Locked nucleic acid with phosphorothioate linkage
  modified_base 2: mod_base = OTHER; note = Locked nucleic acid with phosphorothioate linkage
  modified_base 3: mod_base = OTHER; note = Locked nucleic acid with phosphorothioate linkage
  modified_base 4: mod_base = OTHER; note = 5-methylcytosine with phosphorothioate linkage
  modified_base 5: mod_base = OTHER; note = Nucleotide with phosphorothioate linkage
  modified_base 6: mod_base = OTHER; note = Nucleotide with phosphorothioate linkage
  modified_base 7: mod_base = OTHER; note = 5-methylcytosine with phosphorothioate linkage
  modified_base 8: mod_base = OTHER; note = Nucleotide with phosphorothioate linkage
  modified_base 9: mod_base = OTHER; note = Nucleotide with phosphorothioate linkage
  modified_base 10: mod_base = OTHER; note = Nucleotide with phosphorothioate linkage
  modified_base 11: mod_base = OTHER; note = 5-methylcytosine with phosphorothioate linkage
  modified_base 12: mod_base = OTHER; note = Nucleotide with phosphorothioate linkage
  modified_base 13: mod_base = OTHER; note = Nucleotide with phosphorothioate linkage
  modified_base 14: mod_base = OTHER; note = 5-methylcytosine with phosphorothioate linkage
  modified_base 15: mod_base = OTHER; note = Locked nucleic acid with phosphorothioate linkage
  modified_base 16: mod_base = OTHER; note = Locked nucleic acid with phosphorothioate linkage
  modified_base 17: mod_base = OTHER; note = Locked nucleic acid
attcggctagcttcaat

SEQ ID NO: 325 - DNA, 17 bp, synthetic construct
  source 1..17: mol_type = other DNA
  modified_base 1: mod_base = OTHER; note = Locked 5-methylcytosine with phosphorothioate linkage
  modified_base 2: mod_base = OTHER; note = Locked nucleic acid with phosphorothioate linkage
  modified_base 3: mod_base = OTHER; note = Locked nucleic acid with phosphorothioate linkage
  modified_base 4: mod_base = OTHER; note = Nucleotide with phosphorothioate linkage
  modified_base 5: mod_base = OTHER; note = 5-methylcytosine with phosphorothioate linkage
  modified_base 6: mod_base = OTHER; note = Nucleotide with phosphorothioate linkage
  modified_base 7: mod_base = OTHER; note = Nucleotide with phosphorothioate linkage
  modified_base 8: mod_base = OTHER; note = 5-methylcytosine with phosphorothioate linkage
  modified_base 9: mod_base = OTHER; note = Nucleotide with phosphorothioate linkage
  modified_base 10: mod_base = OTHER; note = Nucleotide with phosphorothioate linkage
  modified_base 11: mod_base = OTHER; note = Nucleotide with phosphorothioate linkage
  modified_base 12: mod_base = OTHER; note = 5-methylcytosine with phosphorothioate linkage
  modified_base 13: mod_base = OTHER; note = Nucleotide with phosphorothioate linkage
  modified_base 14: mod_base = OTHER; note = Nucleotide with phosphorothioate linkage
  modified_base 15: mod_base = OTHER; note = Locked 5-methylcytosine with phosphorothioate linkage
  modified_base 16: mod_base = OTHER; note = Locked nucleic acid with phosphorothioate linkage
  modified_base 17: mod_base = OTHER; note = Locked nucleic acid
cattcggctagcttcaa

SEQ ID NO: 326 - DNA, 17 bp, synthetic construct
  source 1..17: mol_type = other DNA
  modified_base 1: mod_base = OTHER; note = Locked nucleic acid with phosphorothioate linkage
  modified_base 2: mod_base = OTHER; note = Locked nucleic acid with phosphorothioate linkage
  modified_base 3: mod_base = OTHER; note = Locked nucleic acid with phosphorothioate linkage
  modified_base 4: mod_base = OTHER; note = 5-methylcytosine with phosphorothioate linkage
  modified_base 5: mod_base = OTHER; note = Nucleotide with phosphorothioate linkage
  modified_base 6: mod_base = OTHER; note = Nucleotide with phosphorothioate linkage
  modified_base 7: mod_base = OTHER; note = 5-methylcytosine with phosphorothioate linkage
  modified_base 8: mod_base = OTHER; note = Nucleotide with phosphorothioate linkage
  modified_base 9: mod_base = OTHER; note = Nucleotide with phosphorothioate linkage
  modified_base 10: mod_base = OTHER; note = 5-methylcytosine with phosphorothioate linkage
  modified_base 11: mod_base = OTHER; note = Nucleotide with phosphorothioate linkage
  modified_base 12: mod_base = OTHER; note = 5-methylcytosine with phosphorothioate linkage
  modified_base 13: mod_base = OTHER; note = Nucleotide with phosphorothioate linkage
  modified_base 14: mod_base = OTHER; note = 5-methylcytosine with phosphorothioate linkage
  modified_base 15: mod_base = OTHER; note = Locked nucleic acid with phosphorothioate linkage
  modified_base 16: mod_base = OTHER; note = Locked nucleic acid with phosphorothioate linkage
  modified_base 17: mod_base = OTHER; note = Locked 5-methylcytosine
ttgcagctgctcgcttc

SEQ ID NO: 327 - DNA, 17 bp, synthetic construct
  source 1..17: mol_type = other DNA
  modified_base 1: mod_base = OTHER; note = Locked 5-methylcytosine with phosphorothioate linkage
  modified_base 2: mod_base = OTHER; note = Locked nucleic acid with phosphorothioate linkage
  modified_base 3: mod_base = OTHER; note = Locked nucleic acid with phosphorothioate linkage
  modified_base 4: mod_base = OTHER; note = Nucleotide with phosphorothioate linkage
  modified_base 5: mod_base = OTHER; note = Nucleotide with phosphorothioate linkage
  modified_base 6: mod_base = OTHER; note = 5-methylcytosine with phosphorothioate linkage
  modified_base 7: mod_base = OTHER; note = Nucleotide with phosphorothioate linkage
  modified_base 8: mod_base = OTHER; note = Nucleotide with phosphorothioate linkage
  modified_base 9: mod_base = OTHER; note = 5-methylcytosine with phosphorothioate linkage
  modified_base 10: mod_base = OTHER; note = Nucleotide with phosphorothioate linkage
  modified_base 11: mod_base = OTHER; note = Nucleotide with phosphorothioate linkage
  modified_base 12: mod_base = OTHER; note = 5-methylcytosine with phosphorothioate linkage
  modified_base 13: mod_base = OTHER; note = Nucleotide with phosphorothioate linkage
  modified_base 14: mod_base = OTHER; note = 5-methylcytosine with phosphorothioate linkage
  modified_base 15: mod_base = OTHER; note = Locked nucleic acid with phosphorothioate linkage
  modified_base 16: mod_base = OTHER; note = Locked 5-methylcytosine with phosphorothioate linkage
  modified_base 17: mod_base = OTHER; note = Locked nucleic acid
ctttgcagctgctcgct

SEQ ID NO: 328 - DNA, 17 bp, synthetic construct
  source 1..17: mol_type = other DNA
  modified_base 1: mod_base = OTHER; note = Locked nucleic acid with phosphorothioate linkage
  modified_base 2: mod_base = OTHER; note = Locked nucleic acid with phosphorothioate linkage
  modified_base 3: mod_base = OTHER; note = Locked nucleic acid with phosphorothioate linkage
  modified_base 4: mod_base = OTHER; note = Nucleotide with phosphorothioate linkage
  modified_base 5: mod_base = OTHER; note = Nucleotide with phosphorothioate linkage
  modified_base 6: mod_base = OTHER; note = Nucleotide with phosphorothioate linkage
  modified_base 7: mod_base = OTHER; note = Nucleotide with phosphorothioate linkage
  modified_base 8: mod_base = OTHER; note = Nucleotide with phosphorothioate linkage
  modified_base 9: mod_base = OTHER; note = Nucleotide with phosphorothioate linkage
  modified_base 10: mod_base = OTHER; note = Nucleotide with phosphorothioate linkage
  modified_base 11: mod_base = OTHER; note = Nucleotide with phosphorothioate linkage
  modified_base 12: mod_base = OTHER; note = 5-methylcytosine with phosphorothioate linkage
  modified_base 13: mod_base = OTHER; note = Nucleotide with phosphorothioate linkage
  modified_base 14: mod_base = OTHER; note = Nucleotide with phosphorothioate linkage
  modified_base 15: mod_base = OTHER; note = Locked nucleic acid with phosphorothioate linkage
  modified_base 16: mod_base = OTHER; note = Locked 5-methylcytosine with phosphorothioate linkage
  modified_base 17: mod_base = OTHER; note = Locked nucleic acid
ggtggtagtagcgttct

SEQ ID NO: 329 - DNA, 17 bp, synthetic construct
  source 1..17: mol_type = other DNA
  modified_base 1: mod_base = OTHER; note = Locked nucleic acid with phosphorothioate linkage
  modified_base 2: mod_base = OTHER; note = Locked nucleic acid with phosphorothioate linkage
  modified_base 3: mod_base = OTHER; note = Locked nucleic acid with phosphorothioate linkage
  modified_base 4: mod_base = OTHER; note = Nucleotide with phosphorothioate linkage
  modified_base 5: mod_base = OTHER; note = Nucleotide with phosphorothioate linkage
  modified_base 6: mod_base = OTHER; note = Nucleotide with phosphorothioate linkage
  modified_base 7: mod_base = OTHER; note = Nucleotide with phosphorothioate linkage
  modified_base 8: mod_base = OTHER; note = Nucleotide with phosphorothioate linkage
  modified_base 9: mod_base = OTHER; note = Nucleotide with phosphorothioate linkage
  modified_base 10: mod_base = OTHER; note = Nucleotide with phosphorothioate linkage
  modified_base 11: mod_base = OTHER; note = Nucleotide with phosphorothioate linkage
  modified_base 12: mod_base = OTHER; note = Nucleotide with phosphorothioate linkage
  modified_base 13: mod_base = OTHER; note = 5-methylcytosine with phosphorothioate linkage
  modified_base 14: mod_base = OTHER; note = Nucleotide with phosphorothioate linkage
  modified_base 15: mod_base = OTHER; note = Locked nucleic acid with phosphorothioate linkage
  modified_base 16: mod_base = OTHER; note = Locked nucleic acid with phosphorothioate linkage
  modified_base 17: mod_base = OTHER; note = Locked 5-methylcytosine
tggtggtagtagcgttc

SEQ ID NO: 330 - DNA, 17 bp, synthetic construct
  source 1..17: mol_type = other DNA
  modified_base 1: mod_base = OTHER; note = Locked 5-methylcytosine with phosphorothioate linkage
  modified_base 2: mod_base = OTHER; note = Locked nucleic acid with phosphorothioate linkage
  modified_base 3: mod_base = OTHER; note = Locked nucleic acid with phosphorothioate linkage
  modified_base 4: mod_base = OTHER; note = Nucleotide with phosphorothioate linkage
  modified_base 5: mod_base = OTHER; note = Nucleotide with phosphorothioate linkage
  modified_base 6: mod_base = OTHER; note = Nucleotide with phosphorothioate linkage
  modified_base 7: mod_base = OTHER; note = Nucleotide with phosphorothioate linkage
  modified_base 8: mod_base = OTHER; note = Nucleotide with phosphorothioate linkage
  modified_base 9: mod_base = OTHER; note = Nucleotide with phosphorothioate linkage
  modified_base 10: mod_base = OTHER; note = Nucleotide with phosphorothioate linkage
  modified_base 11: mod_base = OTHER; note = Nucleotide with phosphorothioate linkage
  modified_base 12: mod_base = OTHER; note = Nucleotide with phosphorothioate linkage
  modified_base 13: mod_base = OTHER; note = Nucleotide with phosphorothioate linkage
  modified_base 14: mod_base = OTHER; note = 5-methylcytosine with phosphorothioate linkage
  modified_base 15: mod_base = OTHER; note = Locked nucleic acid with phosphorothioate linkage
  modified_base 16: mod_base = OTHER; note = Locked nucleic acid with phosphorothioate linkage
  modified_base 17: mod_base = OTHER; note = Locked nucleic acid
ctggtggtagtagcgtt

SEQ ID NO: 331 - DNA, 17 bp, synthetic construct
  source 1..17: mol_type = other DNA
  modified_base 1: mod_base = OTHER; note = Locked nucleic acid with phosphorothioate linkage
  modified_base 2: mod_base = OTHER; note = Locked 5-methylcytosine with phosphorothioate linkage
  modified_base 3: mod_base = OTHER; note = Locked nucleic acid with phosphorothioate linkage
  modified_base 4: mod_base = OTHER; note = Nucleotide with phosphorothioate linkage
  modified_base 5: mod_base = OTHER; note = 5-methylcytosine with phosphorothioate linkage
  modified_base 6: mod_base = OTHER; note = 5-methylcytosine with phosphorothioate linkage
  modified_base 7: mod_base = OTHER; note = 5-methylcytosine with phosphorothioate linkage
  modified_base 8: mod_base = OTHER; note = Nucleotide with phosphorothioate linkage
  modified_base 9: mod_base = OTHER; note = 5-methylcytosine with phosphorothioate linkage
  modified_base 10: mod_base = OTHER; note = Nucleotide with phosphorothioate linkage
  modified_base 11: mod_base = OTHER; note = Nucleotide with phosphorothioate linkage
  modified_base 12: mod_base = OTHER; note = Nucleotide with phosphorothioate linkage
  modified_base 13: mod_base = OTHER; note = Nucleotide with phosphorothioate linkage
  modified_base 14: mod_base = OTHER; note = Nucleotide with phosphorothioate linkage
  modified_base 15: mod_base = OTHER; note = Locked nucleic acid with phosphorothioate linkage
  modified_base 16: mod_base = OTHER; note = Locked 5-methylcytosine with phosphorothioate linkage
  modified_base 17: mod_base = OTHER; note = Locked nucleic acid
acagccctcagttaact

SEQ ID NO: 332 - DNA, 17 bp, synthetic construct
  source 1..17: mol_type = other DNA
  modified_base 1: mod_base = OTHER; note = Locked nucleic acid with phosphorothioate linkage
  modified_base 2: mod_base = OTHER; note = Locked 5-methylcytosine with phosphorothioate linkage
  modified_base 3: mod_base = OTHER; note = Locked nucleic acid with phosphorothioate linkage
  modified_base 4: mod_base = OTHER; note = Nucleotide with phosphorothioate linkage
  modified_base 5: mod_base = OTHER; note = 5-methylcytosine with phosphorothioate linkage
  modified_base 6: mod_base = OTHER; note = 5-methylcytosine with phosphorothioate linkage
  modified_base 7: mod_base = OTHER; note = 5-methylcytosine with phosphorothioate linkage
  modified_base 8: mod_base = OTHER; note = Nucleotide with phosphorothioate linkage
  modified_base 9: mod_base = OTHER; note = 5-methylcytosine with phosphorothioate linkage
  modified_base 10: mod_base = OTHER; note = Nucleotide with phosphorothioate linkage
  modified_base 11: mod_base = OTHER; note = Nucleotide with phosphorothioate linkage
  modified_base 12: mod_base = OTHER; note = Nucleotide with phosphorothioate linkage
  modified_base 13: mod_base = OTHER; note = Nucleotide with phosphorothioate linkage
  modified_base 14: mod_base = OTHER; note = Nucleotide with phosphorothioate linkage
  modified_base 15: mod_base = OTHER; note = Locked nucleic acid with phosphorothioate linkage
  modified_base 16: mod_base = OTHER; note = Locked 5-methylcytosine with phosphorothioate linkage
  modified_base 17: mod_base = OTHER; note = Locked nucleic acid
acagccctcagttaaca

SEQ ID NO: 333 - DNA, 17 bp, synthetic construct
  source 1..17: mol_type = other DNA
  modified_base 1: mod_base = OTHER; note = Locked nucleic acid with phosphorothioate linkage
  modified_base 2: mod_base = OTHER; note = Locked 5-methylcytosine with phosphorothioate linkage
  modified_base 3: mod_base = OTHER; note = Locked nucleic acid with phosphorothioate linkage
  modified_base 4: mod_base = OTHER; note = Nucleotide with phosphorothioate linkage
  modified_base 5: mod_base = OTHER; note = 5-methylcytosine with phosphorothioate linkage
  modified_base 6: mod_base = OTHER; note = 5-methylcytosine with phosphorothioate linkage
  modified_base 7: mod_base = OTHER; note = 5-methylcytosine with phosphorothioate linkage
  modified_base 8: mod_base = OTHER; note = Nucleotide with phosphorothioate linkage
  modified_base 9: mod_base = OTHER; note = Nucleotide with phosphorothioate linkage
  modified_base 10: mod_base = OTHER; note = Nucleotide with phosphorothioate linkage
  modified_base 11: mod_base = OTHER; note = Nucleotide with phosphorothioate linkage
  modified_base 12: mod_base = OTHER; note = Nucleotide with phosphorothioate linkage
  modified_base 13: mod_base = OTHER; note = Nucleotide with phosphorothioate linkage
  modified_base 14: mod_base = OTHER; note = Nucleotide with phosphorothioate linkage
  modified_base 15: mod_base = OTHER; note = Locked nucleic acid with phosphorothioate linkage
  modified_base 16: mod_base = OTHER; note = Locked 5-methylcytosine with phosphorothioate linkage
  modified_base 17: mod_base = OTHER; note = Locked nucleic acid
acagccctaagttaact

SEQ ID NO: 334 - DNA, 17 bp, synthetic construct
  source 1..17: mol_type = other DNA
  modified_base 1: mod_base = OTHER; note = Locked 5-methylcytosine with phosphorothioate linkage
  modified_base 2: mod_base = OTHER; note = Locked nucleic acid with phosphorothioate linkage
  modified_base 3: mod_base = OTHER; note = Locked 5-methylcytosine with phosphorothioate linkage
  modified_base 4: mod_base = OTHER; note = Nucleotide with phosphorothioate linkage
  modified_base 5: mod_base = OTHER; note = Nucleotide with phosphorothioate linkage
  modified_base 6: mod_base = OTHER; note = 5-methylcytosine with phosphorothioate linkage
  modified_base 7: mod_base = OTHER; note = 5-methylcytosine with phosphorothioate linkage
  modified_base 8: mod_base = OTHER; note = 5-methylcytosine with phosphorothioate linkage
  modified_base 9: mod_base = OTHER; note = Nucleotide with phosphorothioate linkage
  modified_base 10: mod_base = OTHER; note = 5-methylcytosine with phosphorothioate linkage
  modified_base 11: mod_base = OTHER; note = Nucleotide with phosphorothioate linkage
  modified_base 12: mod_base = OTHER; note = Nucleotide with phosphorothioate linkage
  modified_base 13: mod_base = OTHER; note = Nucleotide with phosphorothioate linkage
  modified_base 14: mod_base = OTHER; note = Nucleotide with phosphorothioate linkage
  modified_base 15: mod_base = OTHER; note = Locked nucleic acid with phosphorothioate linkage
  modified_base 16: mod_base = OTHER; note = Locked nucleic acid with phosphorothioate linkage
  modified_base 17: mod_base = OTHER; note = Locked 5-methylcytosine
cacagccctcagttaac

SEQ ID NO: 335 - DNA, 17 bp, synthetic construct
  source 1..17: mol_type = other DNA
  modified_base 1: mod_base = OTHER; note = Locked 5-methylcytosine with phosphorothioate linkage
  modified_base 2: mod_base = OTHER; note = Locked 5-methylcytosine with phosphorothioate linkage
  modified_base 3: mod_base = OTHER; note = Locked nucleic acid with phosphorothioate linkage
  modified_base 4: mod_base = OTHER; note = 5-methylcytosine with phosphorothioate linkage
  modified_base 5: mod_base = OTHER; note = Nucleotide with phosphorothioate linkage
  modified_base 6: mod_base = OTHER; note = Nucleotide with phosphorothioate linkage
  modified_base 7: mod_base = OTHER; note = 5-methylcytosine with phosphorothioate linkage
  modified_base 8: mod_base = OTHER; note = 5-methylcytosine with phosphorothioate linkage
  modified_base 9: mod_base = OTHER; note = 5-methylcytosine with phosphorothioate linkage
  modified_base 10: mod_base = OTHER; note = Nucleotide with phosphorothioate linkage
  modified_base 11: mod_base = OTHER; note = 5-methylcytosine with phosphorothioate linkage
  modified_base 12: mod_base = OTHER; note = Nucleotide with phosphorothioate linkage
  modified_base 13: mod_base = OTHER; note = Nucleotide with phosphorothioate linkage
  modified_base 14: mod_base = OTHER; note = Nucleotide with phosphorothioate linkage
  modified_base 15: mod_base = OTHER; note = Locked nucleic acid with phosphorothioate linkage
  modified_base 16: mod_base = OTHER; note = Locked nucleic acid with phosphorothioate linkage
  modified_base 17: mod_base = OTHER; note = Locked nucleic acid
ccacagccctcagttaa

SEQ ID NO: 336 - DNA, 17 bp, synthetic construct
  source 1..17: mol_type = other DNA
  modified_base 1: mod_base = OTHER; note = Locked nucleic acid with phosphorothioate linkage
  modified_base 2: mod_base = OTHER; note = Locked 5-methylcytosine with phosphorothioate linkage
  modified_base 3: mod_base = OTHER; note = Locked 5-methylcytosine with phosphorothioate linkage
  modified_base 4: mod_base = OTHER; note = Nucleotide with phosphorothioate linkage
  modified_base 5: mod_base = OTHER; note = 5-methylcytosine with phosphorothioate linkage
  modified_base 6: mod_base = OTHER; note = Nucleotide with phosphorothioate linkage
  modified_base 7: mod_base = OTHER; note = Nucleotide with phosphorothioate linkage
  modified_base 8: mod_base = OTHER; note = 5-methylcytosine with phosphorothioate linkage
  modified_base 9: mod_base = OTHER; note = 5-methylcytosine with phosphorothioate linkage
  modified_base 10: mod_base = OTHER; note = 5-methylcytosine with phosphorothioate linkage
  modified_base 11: mod_base = OTHER; note = Nucleotide with phosphorothioate linkage
  modified_base 12: mod_base = OTHER; note = 5-methylcytosine with phosphorothioate linkage
  modified_base 13: mod_base = OTHER; note = Nucleotide with phosphorothioate linkage
  modified_base 14: mod_base = OTHER; note = Nucleotide with phosphorothioate linkage
  modified_base 15: mod_base = OTHER; note = Locked nucleic acid with phosphorothioate linkage
  modified_base 16: mod_base = OTHER; note = Locked nucleic acid with phosphorothioate linkage
  modified_base 17: mod_base = OTHER; note = Locked nucleic acid
tccacagccctcagtta

SEQ ID NO: 337 - DNA, 17 bp, synthetic construct
  source 1..17: mol_type = other DNA
  modified_base 1: mod_base = OTHER; note = Locked 5-methylcytosine with phosphorothioate linkage
  modified_base 2: mod_base = OTHER; note = Locked nucleic acid with phosphorothioate linkage
  modified_base 3: mod_base = OTHER; note = Locked nucleic acid with phosphorothioate linkage
  modified_base 4: mod_base = OTHER; note = Nucleotide with phosphorothioate linkage
  modified_base 5: mod_base = OTHER; note = 5-methylcytosine with phosphorothioate linkage
  modified_base 6: mod_base = OTHER; note = Nucleotide with phosphorothioate linkage
  modified_base 7: mod_base = OTHER; note = Nucleotide with phosphorothioate linkage
  modified_base 8: mod_base = OTHER; note = 5-methylcytosine with phosphorothioate linkage
  modified_base 9: mod_base = OTHER; note = Nucleotide with phosphorothioate linkage
  modified_base 10: mod_base = OTHER; note = Nucleotide with phosphorothioate linkage
  modified_base 11: mod_base = OTHER; note = Nucleotide with phosphorothioate linkage
  modified_base 12: mod_base = OTHER; note = Nucleotide with phosphorothioate linkage
  modified_base 13: mod_base = OTHER; note = 5-methylcytosine with phosphorothioate linkage
  modified_base 14: mod_base = OTHER; note = 5-methylcytosine with phosphorothioate linkage
  modified_base 15: mod_base = OTHER; note = Locked nucleic acid with phosphorothioate linkage
  modified_base 16: mod_base = OTHER; note = Locked 5-methylcytosine with phosphorothioate linkage
  modified_base 17: mod_base = OTHER; note = Locked nucleic acid
caggcttcatttccaca

SEQ ID NO: 338 - DNA, 17 bp, synthetic construct
  source 1..17: mol_type = other DNA
  modified_base 1: mod_base = OTHER; note = Locked nucleic acid with phosphorothioate linkage
  modified_base 2: mod_base = OTHER; note = Locked 5-methylcytosine with phosphorothioate linkage
  modified_base 3: mod_base = OTHER; note = Locked nucleic acid with phosphorothioate linkage
  modified_base 4: mod_base = OTHER; note = Nucleotide with phosphorothioate linkage
  modified_base 5: mod_base = OTHER; note = Nucleotide with phosphorothioate linkage
  modified_base 6: mod_base = OTHER; note = 5-methylcytosine with phosphorothioate linkage
  modified_base 7: mod_base = OTHER; note = Nucleotide with phosphorothioate linkage
  modified_base 8: mod_base = OTHER; note = Nucleotide with phosphorothioate linkage
  modified_base 9: mod_base = OTHER; note = 5-methylcytosine with phosphorothioate linkage
  modified_base 10: mod_base = OTHER; note = Nucleotide with phosphorothioate linkage
  modified_base 11: mod_base = OTHER; note = Nucleotide with phosphorothioate linkage
  modified_base 12: mod_base = OTHER; note = Nucleotide with phosphorothioate linkage
  modified_base 13: mod_base = OTHER; note = Nucleotide with phosphorothioate linkage
  modified_base 14: mod_base = OTHER; note = 5-methylcytosine with phosphorothioate linkage
  modified_base 15: mod_base = OTHER; note = Locked 5-methylcytosine with phosphorothioate linkage
  modified_base 16: mod_base = OTHER; note = Locked nucleic acid with phosphorothioate linkage
  modified_base 17: mod_base = OTHER; note = Locked 5-methylcytosine
gcaggcttcatttccac

SEQ ID NO: 339 - DNA, 17 bp, synthetic construct
  source 1..17: mol_type = other DNA
  modified_base 1: mod_base = OTHER; note = Locked nucleic acid with phosphorothioate linkage
  modified_base 2: mod_base = OTHER; note = Locked nucleic acid with phosphorothioate linkage
  modified_base 3: mod_base = OTHER; note = Locked nucleic acid with phosphorothioate linkage
  modified_base 4: mod_base = OTHER; note = 5-methylcytosine with phosphorothioate linkage
  modified_base 5: mod_base = OTHER; note = Nucleotide with phosphorothioate linkage
  modified_base 6: mod_base = OTHER; note = Nucleotide with phosphorothioate linkage
  modified_base 7: mod_base = OTHER; note = Nucleotide with phosphorothioate linkage
  modified_base 8: mod_base = OTHER; note = 5-methylcytosine with phosphorothioate linkage
  modified_base 9: mod_base = OTHER; note = Nucleotide with phosphorothioate linkage
  modified_base 10: mod_base = OTHER; note = Nucleotide with phosphorothioate linkage
  modified_base 11: mod_base = OTHER; note = 5-methylcytosine with phosphorothioate linkage
  modified_base 12: mod_base = OTHER; note = Nucleotide with phosphorothioate linkage
  modified_base 13: mod_base = OTHER; note = Nucleotide with phosphorothioate linkage
  modified_base 14: mod_base = OTHER; note = Nucleotide with phosphorothioate linkage
  modified_base 15: mod_base = OTHER; note = Locked nucleic acid with phosphorothioate linkage
  modified_base 16: mod_base = OTHER; note = Locked 5-methylcytosine with phosphorothioate linkage
  modified_base 17: mod_base = OTHER; note = Locked 5-methylcytosine
gtgcaggcttcatttcc

SEQ ID NO: 340 - DNA, 17 bp, synthetic construct
  source 1..17: mol_type = other DNA
  modified_base 1: mod_base = OTHER; note = Locked 5-methylcytosine with phosphorothioate linkage
  modified_base 2: mod_base = OTHER; note = Locked nucleic acid with phosphorothioate linkage
  modified_base 3: mod_base = OTHER; note = Locked nucleic acid with phosphorothioate linkage
  modified_base 4: mod_base = OTHER; note = Nucleotide with phosphorothioate linkage
  modified_base 5: mod_base = OTHER; note = 5-methylcytosine with phosphorothioate linkage
  modified_base 6: mod_base = OTHER; note = Nucleotide with phosphorothioate linkage
  modified_base 7: mod_base = OTHER; note = Nucleotide with phosphorothioate linkage
  modified_base 8: mod_base = OTHER; note = Nucleotide with phosphorothioate linkage
  modified_base 9: mod_base = OTHER; note = 5-methylcytosine with phosphorothioate linkage
  modified_base 10: mod_base = OTHER; note = Nucleotide with phosphorothioate linkage
  modified_base 11: mod_base = OTHER; note = Nucleotide with phosphorothioate linkage
  modified_base 12: mod_base = OTHER; note = 5-methylcytosine with phosphorothioate linkage
  modified_base 13: mod_base = OTHER; note = Nucleotide with phosphorothioate linkage
  modified_base 14: mod_base = OTHER; note = Nucleotide with phosphorothioate linkage
  modified_base 15: mod_base = OTHER; note = Locked nucleic acid with phosphorothioate linkage
  modified_base 16: mod_base = OTHER; note = Locked nucleic acid with phosphorothioate linkage
  modified_base 17: mod_base = OTHER; note = Locked 5-methylcytosine
cgtgcaggcttcatttc

SEQ ID NO: 341 - DNA, 17 bp, synthetic construct
  source 1..17: mol_type = other DNA
  modified_base 1: mod_base = OTHER; note = Locked nucleic acid with phosphorothioate linkage
  modified_base 2: mod_base = OTHER; note = Locked 5-methylcytosine with phosphorothioate linkage
  modified_base 3: mod_base = OTHER; note = Locked nucleic acid with phosphorothioate linkage
  modified_base 4: mod_base = OTHER; note = Nucleotide with phosphorothioate linkage
  modified_base 5: mod_base = OTHER; note = Nucleotide with phosphorothioate linkage
  modified_base 6: mod_base = OTHER; note = 5-methylcytosine with phosphorothioate linkage
  modified_base 7: mod_base = OTHER; note = Nucleotide with phosphorothioate linkage
  modified_base 8: mod_base = OTHER; note = Nucleotide with phosphorothioate linkage
  modified_base 9: mod_base = OTHER; note = Nucleotide with phosphorothioate linkage
  modified_base 10: mod_base = OTHER; note = 5-methylcytosine with phosphorothioate linkage
  modified_base 11: mod_base = OTHER; note = Nucleotide with phosphorothioate linkage
  modified_base 12: mod_base = OTHER; note = Nucleotide with phosphorothioate linkage
  modified_base 13: mod_base = OTHER; note = 5-methylcytosine with phosphorothioate linkage
  modified_base 14: mod_base = OTHER; note = Nucleotide with phosphorothioate linkage
  modified_base 15: mod_base = OTHER; note = Locked nucleic acid with phosphorothioate linkage
  modified_base 16: mod_base = OTHER; note = Locked nucleic acid with phosphorothioate linkage
  modified_base 17: mod_base = OTHER; note = Locked nucleic acid
tcgtgcaggcttcattt

SEQ ID NO: 342 - DNA, 17 bp, synthetic construct
  source 1..17: mol_type = other DNA
  modified_base 1: mod_base = OTHER; note = Locked nucleic acid with phosphorothioate linkage
  modified_base 2: mod_base = OTHER; note = Locked nucleic acid with phosphorothioate linkage
  modified_base 3: mod_base = OTHER; note = Locked 5-methylcytosine with phosphorothioate linkage
  modified_base 4: mod_base = OTHER; note = Nucleotide with phosphorothioate linkage
  modified_base 5: mod_base = OTHER; note = Nucleotide with phosphorothioate linkage
  modified_base 6: mod_base = OTHER; note = Nucleotide with phosphorothioate linkage
  modified_base 7: mod_base = OTHER; note = 5-methylcytosine with phosphorothioate linkage
  modified_base 8: mod_base = OTHER; note = Nucleotide with phosphorothioate linkage
  modified_base 9: mod_base = OTHER; note = Nucleotide with phosphorothioate linkage
  modified_base 10: mod_base = OTHER; note = Nucleotide with phosphorothioate linkage
  modified_base 11: mod_base = OTHER; note = 5-methylcytosine with phosphorothioate linkage
  modified_base 12: mod_base = OTHER; note = Nucleotide with phosphorothioate linkage
  modified_base 13: mod_base = OTHER; note = Nucleotide with phosphorothioate linkage
  modified_base 14: mod_base = OTHER; note = 5-methylcytosine with phosphorothioate linkage
  modified_base 15: mod_base = OTHER; note = Locked nucleic acid with phosphorothioate linkage
  modified_base 16: mod_base = OTHER; note = Locked nucleic acid with phosphorothioate linkage
  modified_base 17: mod_base = OTHER; note = Locked nucleic acid
ttcgtgcaggcttcatt

SEQ ID NO: 343 - DNA, 17 bp, synthetic construct
  source 1..17: mol_type = other DNA
  modified_base 1: mod_base = OTHER; note = Locked nucleic acid with phosphorothioate linkage
  modified_base 2: mod_base = OTHER; note = Locked nucleic acid with phosphorothioate linkage
  modified_base 3: mod_base = OTHER; note = Locked nucleic acid with phosphorothioate linkage
  modified_base 4: mod_base = OTHER; note = 5-methylcytosine with phosphorothioate linkage
  modified_base 5: mod_base = OTHER; note = Nucleotide with phosphorothioate linkage
  modified_base 6: mod_base = OTHER; note = Nucleotide with phosphorothioate linkage
  modified_base 7: mod_base = OTHER; note = Nucleotide with phosphorothioate linkage
  modified_base 8: mod_base = OTHER; note = 5-methylcytosine with phosphorothioate linkage
  modified_base 9: mod_base = OTHER; note = Nucleotide with phosphorothioate linkage
  modified_base 10: mod_base = OTHER; note = Nucleotide with phosphorothioate linkage
  modified_base 11: mod_base = OTHER; note = Nucleotide with phosphorothioate linkage
  modified_base 12: mod_base = OTHER; note = 5-methylcytosine with phosphorothioate linkage
  modified_base 13: mod_base = OTHER; note = Nucleotide with phosphorothioate linkage
  modified_base 14: mod_base = OTHER; note = Nucleotide with phosphorothioate linkage
  modified_base 15: mod_base = OTHER; note = Locked 5-methylcytosine with phosphorothioate linkage
  modified_base 16: mod_base = OTHER; note = Locked nucleic acid with phosphorothioate linkage
  modified_base 17: mod_base = OTHER; note = Locked nucleic acid
attcgtgcaggcttcat

SEQ ID NO: 344 - DNA, 17 bp, synthetic construct
  source 1..17: mol_type = other DNA
  modified_base 1: mod_base = OTHER; note = Locked nucleic acid with phosphorothioate linkage
  modified_base 2: mod_base = OTHER; note = Locked nucleic acid with phosphorothioate linkage
  modified_base 3: mod_base = OTHER; note = Locked nucleic acid with phosphorothioate linkage
  modified_base 4: mod_base = OTHER; note = 5-methylcytosine with phosphorothioate linkage
  modified_base 5: mod_base = OTHER; note = Nucleotide with phosphorothioate linkage
  modified_base 6: mod_base = OTHER; note = 5-methylcytosine with phosphorothioate linkage
  modified_base 7: mod_base = OTHER; note = Nucleotide with phosphorothioate linkage
  modified_base 8: mod_base = OTHER; note = Nucleotide with phosphorothioate linkage
  modified_base 9: mod_base = OTHER; note = Nucleotide with phosphorothioate linkage
  modified_base 10: mod_base = OTHER; note = Nucleotide with phosphorothioate linkage
  modified_base 11: mod_base = OTHER; note = 5-methylcytosine with phosphorothioate linkage
  modified_base 12: mod_base = OTHER; note = Nucleotide with phosphorothioate linkage
  modified_base 13: mod_base = OTHER; note = 5-methylcytosine with phosphorothioate linkage
  modified_base 14: mod_base = OTHER; note = Nucleotide with phosphorothioate linkage
  modified_base 15: mod_base = OTHER; note = Locked nucleic acid with phosphorothioate linkage
  modified_base 16: mod_base = OTHER; note = Locked nucleic acid with phosphorothioate linkage
  modified_base 17: mod_base = OTHER; note = Locked 5-methylcytosine
aagcacaaaactcattc

SEQ ID NO: 345 - DNA, 17 bp, synthetic construct
  source 1..17: mol_type = other DNA
  modified_base 1: mod_base = OTHER; note = Locked nucleic acid with phosphorothioate linkage
  modified_base 2: mod_base = OTHER; note = Locked nucleic acid with phosphorothioate linkage
  modified_base 3: mod_base = OTHER; note = Locked nucleic acid with phosphorothioate linkage
  modified_base 4: mod_base = OTHER; note = Nucleotide with phosphorothioate linkage
  modified_base 5: mod_base = OTHER; note = 5-methylcytosine with phosphorothioate linkage
  modified_base 6: mod_base = OTHER; note = Nucleotide with phosphorothioate linkage
  modified_base 7: mod_base = OTHER; note = Nucleotide with phosphorothioate linkage
  modified_base 8: mod_base = OTHER; note = Nucleotide with phosphorothioate linkage
  modified_base 9: mod_base = OTHER; note = Nucleotide with phosphorothioate linkage
  modified_base 10: mod_base = OTHER; note = Nucleotide with phosphorothioate linkage
  modified_base 11: mod_base = OTHER; note = Nucleotide with phosphorothioate linkage
  modified_base 12: mod_base = OTHER; note = 5-methylcytosine with phosphorothioate linkage
  modified_base 13: mod_base = OTHER; note = Nucleotide with phosphorothioate linkage
  modified_base 14: mod_base = OTHER; note = 5-methylcytosine with phosphorothioate linkage
  modified_base 15: mod_base = OTHER; note = Locked nucleic acid with phosphorothioate linkage
  modified_base 16: mod_base = OTHER; note = Locked nucleic acid with phosphorothioate linkage
  modified_base 17: mod_base = OTHER; note = Locked nucleic acid
tggacaggaagcacaaa

SEQ ID NO: 346 - DNA, 17 bp, synthetic construct
  source 1..17: mol_type = other DNA
  modified_base 1: mod_base = OTHER; note = Locked nucleic acid with phosphorothioate linkage
  modified_base 2: mod_base = OTHER; note = Locked nucleic acid with phosphorothioate linkage
  modified_base 3: mod_base = OTHER; note = Locked nucleic acid with phosphorothioate linkage
  modified_base 4: mod_base = OTHER; note = Nucleotide with phosphorothioate linkage
  modified_base 5: mod_base = OTHER; note = Nucleotide with phosphorothioate linkage
  modified_base 6: mod_base = OTHER; note = Nucleotide with phosphorothioate linkage
  modified_base 7: mod_base = OTHER; note = Nucleotide with phosphorothioate linkage
  modified_base 8: mod_base = OTHER; note = 5-methylcytosine with phosphorothioate linkage
  modified_base 9: mod_base = OTHER; note = Nucleotide with phosphorothioate linkage
  modified_base 10: mod_base = OTHER; note = Nucleotide with phosphorothioate linkage
  modified_base 11: mod_base = OTHER; note = Nucleotide with phosphorothioate linkage
  modified_base 12: mod_base = OTHER; note = Nucleotide with phosphorothioate linkage
  modified_base 13: mod_base = OTHER; note = Nucleotide with phosphorothioate linkage
  modified_base 14: mod_base = OTHER; note = Nucleotide with phosphorothioate linkage
  modified_base 15: mod_base = OTHER; note = Locked 5-methylcytosine with phosphorothioate linkage
  modified_base 16: mod_base = OTHER; note = Locked nucleic acid with phosphorothioate linkage
  modified_base 17: mod_base = OTHER; note = Locked 5-methylcytosine
agttggacaggaagcac

SEQ ID NO: 347 - DNA, 17 bp, synthetic construct
  source 1..17: mol_type = other DNA
  modified_base 1: mod_base = OTHER; note = Locked nucleic acid with phosphorothioate linkage
  modified_base 2: mod_base = OTHER; note = Locked nucleic acid with phosphorothioate linkage
  modified_base 3: mod_base = OTHER; note = Locked nucleic acid with phosphorothioate linkage
  modified_base 4: mod_base = OTHER; note = Nucleotide with phosphorothioate linkage
  modified_base 5: mod_base = OTHER; note = Nucleotide with phosphorothioate linkage
  modified_base 6: mod_base = OTHER; note = Nucleotide with phosphorothioate linkage
  modified_base 7: mod_base = OTHER; note = Nucleotide with phosphorothioate linkage
  modified_base 8: mod_base = OTHER; note = Nucleotide with phosphorothioate linkage
  modified_base 9: mod_base = OTHER; note = 5-methylcytosine with phosphorothioate linkage
  modified_base 10: mod_base = OTHER; note = Nucleotide with phosphorothioate linkage
  modified_base 11: mod_base = OTHER; note = Nucleotide with phosphorothioate linkage
  modified_base 12: mod_base = OTHER; note = Nucleotide with phosphorothioate linkage
  modified_base 13: mod_base = OTHER; note = Nucleotide with phosphorothioate linkage
  modified_base 14: mod_base = OTHER; note = Nucleotide with phosphorothioate linkage
  modified_base 15: mod_base = OTHER; note = Locked nucleic acid with phosphorothioate linkage
  modified_base 16: mod_base = OTHER; note = Locked 5-methylcytosine with phosphorothioate linkage
  modified_base 17: mod_base = OTHER; note = Locked nucleic acid
aagttggacaggaagca

SEQ ID NO: 348 - DNA, 17 bp, synthetic construct
  source 1..17: mol_type = other DNA
  modified_base 1: mod_base = OTHER; note = Locked 5-methylcytosine with phosphorothioate linkage
  modified_base 2: mod_base = OTHER; note = Locked 5-methylcytosine with phosphorothioate linkage
  modified_base 3: mod_base = OTHER; note = Locked nucleic acid with phosphorothioate linkage
  modified_base 4: mod_base = OTHER; note = Nucleotide with phosphorothioate linkage
  modified_base 5: mod_base = OTHER; note = Nucleotide with phosphorothioate linkage
  modified_base 6: mod_base = OTHER; note = 5-methylcytosine with phosphorothioate linkage
  modified_base 7: mod_base = OTHER; note = Nucleotide with phosphorothioate linkage
  modified_base 8: mod_base = OTHER; note = Nucleotide with phosphorothioate linkage
  modified_base 9: mod_base = OTHER; note = Nucleotide with phosphorothioate linkage
  modified_base 10: mod_base = OTHER; note = Nucleotide with phosphorothioate linkage
  modified_base 11: mod_base = OTHER; note = Nucleotide with phosphorothioate linkage
  modified_base 12: mod_base = OTHER; note = Nucleotide with phosphorothioate linkage
  modified_base 13: mod_base = OTHER; note = Nucleotide with phosphorothioate linkage
  modified_base 14: mod_base = OTHER; note = Nucleotide with phosphorothioate linkage
  modified_base 15: mod_base = OTHER; note = Locked nucleic acid with phosphorothioate linkage
  modified_base 16: mod_base = OTHER; note = Locked nucleic acid with phosphorothioate linkage
  modified_base 17: mod_base = OTHER; note = Locked nucleic acid
ccatacgaagaaaagtt

SEQ ID NO: 349 - DNA, 17 bp, synthetic construct
  source 1..17: mol_type = other DNA
  modified_base 1: mod_base = OTHER; note = Locked nucleic acid with phosphorothioate linkage
  modified_base 2: mod_base = OTHER; note = Locked nucleic acid with phosphorothioate linkage
  modified_base 3: mod_base = OTHER; note = Locked nucleic acid with phosphorothioate linkage
  modified_base 4: mod_base = OTHER; note = Nucleotide with phosphorothioate linkage
  modified_base 5: mod_base = OTHER; note = Nucleotide with phosphorothioate linkage
  modified_base 6: mod_base = OTHER; note = 5-methylcytosine with phosphorothioate linkage
  modified_base 7: mod_base = OTHER; note = Nucleotide with phosphorothioate linkage
  modified_base 8: mod_base = OTHER; note = Nucleotide with phosphorothioate linkage
  modified_base 9: mod_base = OTHER; note = Nucleotide with phosphorothioate linkage
  modified_base 10: mod_base = OTHER; note = Nucleotide with phosphorothioate linkage
  modified_base 11: mod_base = OTHER; note = Nucleotide with phosphorothioate linkage
  modified_base 12: mod_base = OTHER; note = Nucleotide with phosphorothioate linkage
  modified_base 13: mod_base = OTHER; note = Nucleotide with phosphorothioate linkage
  modified_base 14: mod_base = OTHER; note = Nucleotide with phosphorothioate linkage
  modified_base 15: mod_base = OTHER; note = Locked 5-methylcytosine with phosphorothioate linkage
  modified_base 16: mod_base = OTHER; note = Locked nucleic acid with phosphorothioate linkage
  modified_base 17: mod_base = OTHER; note = Locked 5-methylcytosine
ttaatcttataaagctc

SEQ ID NO: 350 - DNA, 17 bp, synthetic construct
  source 1..17: mol_type = other DNA
  modified_base 1: mod_base = OTHER; note = Locked 5-methylcytosine with phosphorothioate linkage
  modified_base 2: mod_base = OTHER; note = Locked nucleic acid with phosphorothioate linkage
  modified_base 3: mod_base = OTHER; note = Locked nucleic acid with phosphorothioate linkage
  modified_base 4: mod_base = OTHER; note = Nucleotide with phosphorothioate linkage
  modified_base 5: mod_base = OTHER; note = Nucleotide with phosphorothioate linkage
  modified_base 6: mod_base = OTHER; note = 5-methylcytosine with phosphorothioate linkage
  modified_base 7: mod_base = OTHER; note = Nucleotide with phosphorothioate linkage
  modified_base 8: mod_base = OTHER; note = Nucleotide with phosphorothioate linkage
  modified_base 9: mod_base = OTHER; note = Nucleotide with phosphorothioate linkage
  modified_base 10: mod_base = OTHER; note = 5-methylcytosine with phosphorothioate linkage
  modified_base 11: mod_base = OTHER; note = Nucleotide with phosphorothioate linkage
  modified_base 12: mod_base = OTHER; note = 5-methylcytosine with phosphorothioate linkage
  modified_base 13: mod_base = OTHER; note = 5-methylcytosine with phosphorothioate linkage
  modified_base 14: mod_base = OTHER; note = Nucleotide with phosphorothioate linkage
  modified_base 15: mod_base = OTHER; note = Locked nucleic acid with phosphorothioate linkage
  modified_base 16: mod_base = OTHER; note = Locked nucleic acid with phosphorothioate linkage
  modified_base 17: mod_base = OTHER; note = Locked 5-methylcytosine
ctgagcttgctcctttc

SEQ ID NO: 351 - DNA, 17 bp, synthetic construct
  source 1..17: mol_type = other DNA
  modified_base 1: mod_base = OTHER; note = Locked nucleic acid with phosphorothioate linkage
  modified_base 2: mod_base = OTHER; note = Locked 5-methylcytosine with phosphorothioate linkage
  modified_base 3: mod_base = OTHER; note = Locked nucleic acid with phosphorothioate linkage
  modified_base 4: mod_base = OTHER; note = Nucleotide with phosphorothioate linkage
  modified_base 5: mod_base = OTHER; note = Nucleotide with phosphorothioate linkage
  modified_base 6: mod_base = OTHER; note = Nucleotide with phosphorothioate linkage
  modified_base 7: mod_base = OTHER; note = 5-methylcytosine with phosphorothioate linkage
  modified_base 8: mod_base = OTHER; note = Nucleotide with phosphorothioate linkage
  modified_base 9: mod_base = OTHER; note = Nucleotide with phosphorothioate linkage
  modified_base 10: mod_base = OTHER; note = Nucleotide with phosphorothioate linkage
  modified_base 11: mod_base = OTHER; note = 5-methylcytosine with phosphorothioate linkage
  modified_base 12: mod_base = OTHER; note = Nucleotide with phosphorothioate linkage
  modified_base 13: mod_base = OTHER; note = 5-methylcytosine with phosphorothioate linkage
  modified_base 14: mod_base = OTHER; note = 5-methylcytosine with phosphorothioate linkage
  modified_base 15: mod_base = OTHER; note = Locked nucleic acid with phosphorothioate linkage
  modified_base 16: mod_base = OTHER; note = Locked nucleic acid with phosphorothioate linkage
  modified_base 17: mod_base = OTHER; note = Locked nucleic acid
gctgagcttgctccttt

SEQ ID NO: 352 - DNA, 17 bp, synthetic construct
  source 1..17: mol_type = other DNA
  modified_base 1: mod_base = OTHER; note = Locked nucleic acid with phosphorothioate linkage
  modified_base 2: mod_base = OTHER; note = Locked nucleic acid with phosphorothioate linkage
  modified_base 3: mod_base = OTHER; note = Locked nucleic acid with phosphorothioate linkage
  modified_base 4: mod_base = OTHER; note = Nucleotide with phosphorothioate linkage
  modified_base 5: mod_base = OTHER; note = Nucleotide with phosphorothioate linkage
  modified_base 6: mod_base = OTHER; note = Nucleotide with phosphorothioate linkage
  modified_base 7: mod_base = OTHER; note = 5-methylcytosine with phosphorothioate linkage
  modified_base 8: mod_base = OTHER; note = Nucleotide with phosphorothioate linkage
  modified_base 9: mod_base = OTHER; note = Nucleotide with phosphorothioate linkage
  modified_base 10: mod_base = OTHER; note = Nucleotide with phosphorothioate linkage
  modified_base 11: mod_base = OTHER; note = Nucleotide with phosphorothioate linkage
  modified_base 12: mod_base = OTHER; note = 5-methylcytosine with phosphorothioate linkage
  modified_base 13: mod_base = OTHER; note = Nucleotide with phosphorothioate linkage
  modified_base 14: mod_base = OTHER; note = Nucleotide with phosphorothioate linkage
  modified_base 15: mod_base = OTHER; note = Locked nucleic acid with phosphorothioate linkage
  modified_base 16: mod_base = OTHER; note = Locked 5-methylcytosine with phosphorothioate linkage
  modified_base 17: mod_base = OTHER; note = Locked nucleic acid
ggtaagctgagcttgct

SEQ ID NO: 353 - DNA, 17 bp, synthetic construct
  source 1..17: mol_type = other DNA
  modified_base 1: mod_base = OTHER; note = Locked nucleic acid with phosphorothioate linkage
  modified_base 2: mod_base = OTHER; note = Locked 5-methylcytosine with phosphorothioate linkage
  modified_base 3: mod_base = OTHER; note = Locked nucleic acid with phosphorothioate linkage
  modified_base 4: mod_base = OTHER; note = Nucleotide with phosphorothioate linkage
  modified_base 5: mod_base = OTHER; note = Nucleotide with phosphorothioate linkage
  modified_base 6: mod_base = OTHER; note = Nucleotide with phosphorothioate linkage
  modified_base 7: mod_base = OTHER; note = Nucleotide with phosphorothioate linkage
  modified_base 8: mod_base = OTHER; note = Nucleotide with phosphorothioate linkage
  modified_base 9: mod_base = OTHER; note = Nucleotide with phosphorothioate linkage
  modified_base 10: mod_base = OTHER; note = Nucleotide with phosphorothioate linkage
  modified_base 11: mod_base = OTHER; note = 5-methylcytosine with phosphorothioate linkage
  modified_base 12: mod_base = OTHER; note = Nucleotide with phosphorothioate linkage
  modified_base 13: mod_base = OTHER; note = Nucleotide with phosphorothioate linkage
  modified_base 14: mod_base = OTHER; note = Nucleotide with phosphorothioate linkage
  modified_base 15: mod_base = OTHER; note = Locked nucleic acid with phosphorothioate linkage
  modified_base 16: mod_base = OTHER; note = Locked 5-methylcytosine with phosphorothioate linkage
  modified_base 17: mod_base = OTHER; note = Locked nucleic acid
tcaaggtaagctgagct

SEQ ID NO: 354 - DNA, 17 bp, synthetic construct
  source 1..17: mol_type = other DNA
  modified_base 1: mod_base = OTHER; note = Locked nucleic acid with phosphorothioate linkage
  modified_base 2: mod_base = OTHER; note = Locked nucleic acid with phosphorothioate linkage
  modified_base 3: mod_base = OTHER; note = Locked nucleic acid with phosphorothioate linkage
  modified_base 4: mod_base = OTHER; note = Nucleotide with phosphorothioate linkage
  modified_base 5: mod_base = OTHER; note = Nucleotide with phosphorothioate linkage
  modified_base 6: mod_base = OTHER; note = Nucleotide with phosphorothioate linkage
  modified_base 7: mod_base = OTHER; note = Nucleotide with phosphorothioate linkage
  modified_base 8: mod_base = OTHER; note = Nucleotide with phosphorothioate linkage
  modified_base 9: mod_base = OTHER; note = Nucleotide with phosphorothioate linkage
  modified_base 10: mod_base = OTHER; note = Nucleotide with phosphorothioate linkage
  modified_base 11: mod_base = OTHER; note = Nucleotide with phosphorothioate linkage
  modified_base 12: mod_base = OTHER; note = 5-methylcytosine with phosphorothioate linkage
  modified_base 13: mod_base = OTHER; note = Nucleotide with phosphorothioate linkage
  modified_base 14: mod_base = OTHER; note = 5-methylcytosine with phosphorothioate linkage
  modified_base 15: mod_base = OTHER; note = Locked nucleic acid with phosphorothioate linkage
  modified_base 16: mod_base = OTHER; note = Locked nucleic acid with phosphorothioate linkage
  modified_base 17: mod_base = OTHER; note = Locked 5-methylcytosine
gttaagtaagtcacatc

SEQ ID NO: 355 - DNA, 17 bp, synthetic construct
  source 1..17: mol_type = other DNA
  modified_base 1: mod_base = OTHER; note = Locked nucleic acid with phosphorothioate linkage
  modified_base 2: mod_base = OTHER; note = Locked nucleic acid with phosphorothioate linkage
  modified_base 3: mod_base = OTHER; note = Locked nucleic acid with phosphorothioate linkage
  modified_base 4: mod_base = OTHER; note = Nucleotide with phosphorothioate linkage
  modified_base 5: mod_base = OTHER; note = 5-methylcytosine with phosphorothioate linkage
  modified_base 6: mod_base = OTHER; note = Nucleotide with phosphorothioate linkage
  modified_base 7: mod_base = OTHER; note = Nucleotide with phosphorothioate linkage
  modified_base 8: mod_base = OTHER; note = Nucleotide with phosphorothioate linkage
  modified_base 9: mod_base = OTHER; note = Nucleotide with phosphorothioate linkage
  modified_base 10: mod_base = OTHER; note = Nucleotide with phosphorothioate linkage
  modified_base 11: mod_base = OTHER; note = Nucleotide with phosphorothioate linkage
  modified_base 12: mod_base = OTHER; note = Nucleotide with phosphorothioate linkage
  modified_base 13: mod_base = OTHER; note = Nucleotide with phosphorothioate linkage
  modified_base 14: mod_base = OTHER; note = 5-methylcytosine with phosphorothioate linkage
  modified_base 15: mod_base = OTHER; note = Locked nucleic acid with phosphorothioate linkage
  modified_base 16: mod_base = OTHER; note = Locked nucleic acid with phosphorothioate linkage
  modified_base 17: mod_base = OTHER; note = Locked nucleic acid
aattcaagaatttcata

SEQ ID NO: 356 - DNA, 17 bp, synthetic construct
  source 1..17: mol_type = other DNA
  modified_base 1: mod_base = OTHER; note = Locked nucleic acid with phosphorothioate linkage
  modified_base 2: mod_base = OTHER; note = Locked 5-methylcytosine with phosphorothioate linkage
  modified_base 3: mod_base = OTHER; note = Locked 5-methylcytosine with phosphorothioate linkage
  modified_base 4: mod_base = OTHER; note = Nucleotide with phosphorothioate linkage
  modified_base 5: mod_base = OTHER; note = 5-methylcytosine with phosphorothioate linkage
  modified_base 6: mod_base = OTHER; note = Nucleotide with phosphorothioate linkage
  modified_base 7: mod_base = OTHER; note = 5-methylcytosine with phosphorothioate linkage
  modified_base 8: mod_base = OTHER; note = Nucleotide with phosphorothioate linkage
  modified_base 9: mod_base = OTHER; note = Nucleotide with phosphorothioate linkage
  modified_base 10: mod_base = OTHER; note = Nucleotide with phosphorothioate linkage
  modified_base 11: mod_base = OTHER; note = 5-methylcytosine with phosphorothioate linkage
  modified_base 12: mod_base = OTHER; note = Nucleotide with phosphorothioate linkage
  modified_base 13: mod_base = OTHER; note = 5-methylcytosine with phosphorothioate linkage
  modified_base 14: mod_base = OTHER; note = Nucleotide with phosphorothioate linkage
  modified_base 15: mod_base = OTHER; note = Locked nucleic acid with phosphorothioate linkage
  modified_base 16: mod_base = OTHER; note = Locked 5-methylcytosine with phosphorothioate linkage
  modified_base 17: mod_base = OTHER; note = Locked nucleic acid
tcctctctttctctaca

SEQ ID NO: 357 - DNA, 17 bp, synthetic construct
  source 1..17: mol_type = other DNA
  modified_base 1: mod_base = OTHER; note = Locked 5-methylcytosine with phosphorothioate linkage
  modified_base 2: mod_base = OTHER; note = Locked nucleic acid with phosphorothioate linkage
  modified_base 3: mod_base = OTHER; note = Locked nucleic acid with phosphorothioate linkage
  modified_base 4: mod_base = OTHER; note = 5-methylcytosine with phosphorothioate linkage
  modified_base 5: mod_base = OTHER; note = Nucleotide with phosphorothioate linkage
  modified_base 6: mod_base = OTHER; note = 5-methylcytosine with phosphorothioate linkage
  modified_base 7: mod_base = OTHER; note = Nucleotide with phosphorothioate linkage
  modified_base 8: mod_base = OTHER; note = Nucleotide with phosphorothioate linkage
  modified_base 9: mod_base = OTHER; note = Nucleotide with phosphorothioate linkage
  modified_base 10: mod_base = OTHER; note = Nucleotide with phosphorothioate linkage
  modified_base 11: mod_base = OTHER; note = Nucleotide with phosphorothioate linkage
  modified_base 12: mod_base = OTHER; note = Nucleotide with phosphorothioate linkage
  modified_base 13: mod_base = OTHER; note = Nucleotide with phosphorothioate linkage
  modified_base 14: mod_base = OTHER; note = Nucleotide with phosphorothioate linkage
  modified_base 15: mod_base = OTHER; note = Locked nucleic acid with phosphorothioate linkage
  modified_base 16: mod_base = OTHER; note = Locked 5-methylcytosine with phosphorothioate linkage
  modified_base 17: mod_base = OTHER; note = Locked nucleic acid
cagcactagaaaaaact

SEQ ID NO: 358 - DNA, 17 bp, synthetic construct
  source 1..17: mol_type = other DNA
  modified_base 1: mod_base = OTHER; note = Locked nucleic acid with phosphorothioate linkage
  modified_base 2: mod_base = OTHER; note = Locked nucleic acid with phosphorothioate linkage
  modified_base 3: mod_base = OTHER; note = Locked 5-methylcytosine with phosphorothioate linkage
  modified_base 4: mod_base = OTHER; note = 5-methylcytosine with phosphorothioate linkage
  modified_base 5: mod_base = OTHER; note = Nucleotide with phosphorothioate linkage
  modified_base 6: mod_base = OTHER; note = 5-methylcytosine with phosphorothioate linkage
  modified_base 7: mod_base = OTHER; note = Nucleotide with phosphorothioate linkage
  modified_base 8: mod_base = OTHER; note = Nucleotide with phosphorothioate linkage
  modified_base 9: mod_base = OTHER; note = 5-methylcytosine with phosphorothioate linkage
  modified_base 10: mod_base = OTHER; note = Nucleotide with phosphorothioate linkage
  modified_base 11: mod_base = OTHER; note = 5-methylcytosine with phosphorothioate linkage
  modified_base 12: mod_base = OTHER; note = Nucleotide with phosphorothioate linkage
  modified_base 13: mod_base = OTHER; note = Nucleotide with phosphorothioate linkage
  modified_base 14: mod_base = OTHER; note = Nucleotide with phosphorothioate linkage
  modified_base 15: mod_base = OTHER; note = Locked nucleic acid with phosphorothioate linkage
  modified_base 16: mod_base = OTHER; note = Locked nucleic acid with phosphorothioate linkage
  modified_base 17: mod_base = OTHER; note = Locked nucleic acid
tgcctcagcactagaaa

SEQ ID NO: 359 - DNA, 18 bp, synthetic construct
  source 1..18: mol_type = other DNA
  modified_base 1: mod_base = OTHER; note = Locked nucleic acid with phosphorothioate linkage
  modified_base 2: mod_base = OTHER; note = Locked 5-methylcytosine with phosphorothioate linkage
  modified_base 3: mod_base = OTHER; note = Locked nucleic acid with phosphorothioate linkage
  modified_base 4: mod_base = OTHER; note = Nucleotide with phosphorothioate linkage
  modified_base 5: mod_base = OTHER; note = Nucleotide with phosphorothioate linkage
  modified_base 6: mod_base = OTHER; note = 5-methylcytosine with phosphorothioate linkage
  modified_base 7: mod_base = OTHER; note = Nucleotide with phosphorothioate linkage
  modified_base 8: mod_base = OTHER; note = 5-methylcytosine with phosphorothioate linkage
  modified_base 9: mod_base = OTHER; note = Nucleotide with phosphorothioate linkage
  modified_base 10: mod_base = OTHER; note = Nucleotide with phosphorothioate linkage
  modified_base 11: mod_base = OTHER; note = Nucleotide with phosphorothioate linkage
  modified_base 12: mod_base = OTHER; note = 5-methylcytosine with phosphorothioate linkage
  modified_base 13: mod_base = OTHER; note = Nucleotide with phosphorothioate linkage
  modified_base 14: mod_base = OTHER; note = 5-methylcytosine with phosphorothioate linkage
  modified_base 15: mod_base = OTHER; note = Nucleotide with phosphorothioate linkage
  modified_base 16: mod_base = OTHER; note = Locked nucleic acid with phosphorothioate linkage
  modified_base 17: mod_base = OTHER; note = Locked 5-methylcytosine with phosphorothioate linkage
  modified_base 18: mod_base = OTHER; note = Locked 5-methylcytosine
tcgttctctttcgctgcc

SEQ ID NO: 360 - DNA, 18 bp, synthetic construct
  source 1..18: mol_type = other DNA
  modified_base 1: mod_base = OTHER; note = Locked nucleic acid with phosphorothioate linkage
  modified_base 2: mod_base = OTHER; note = Locked 5-methylcytosine with phosphorothioate linkage
  modified_base 3: mod_base = OTHER; note = Locked 5-methylcytosine with phosphorothioate linkage
  modified_base 4: mod_base = OTHER; note = Nucleotide with phosphorothioate linkage
  modified_base 5: mod_base = OTHER; note = 5-methylcytosine with phosphorothioate linkage
  modified_base 6: mod_base = OTHER; note = Nucleotide with phosphorothioate linkage
  modified_base 7: mod_base = OTHER; note = Nucleotide with phosphorothioate linkage
  modified_base 8: mod_base = OTHER; note = Nucleotide with phosphorothioate linkage
  modified_base 9: mod_base = OTHER; note = 5-methylcytosine with phosphorothioate linkage
  modified_base 10: mod_base = OTHER; note = Nucleotide with phosphorothioate linkage
  modified_base 11: mod_base = OTHER; note = 5-methylcytosine with phosphorothioate linkage
  modified_base 12: mod_base = OTHER; note = Nucleotide with phosphorothioate linkage
  modified_base 13: mod_base = OTHER; note = Nucleotide with phosphorothioate linkage
  modified_base 14: mod_base = OTHER; note = Nucleotide with phosphorothioate linkage
  modified_base 15: mod_base = OTHER; note = 5-methylcytosine with phosphorothioate linkage
  modified_base 16: mod_base = OTHER; note = Locked nucleic acid with phosphorothioate linkage
  modified_base 17: mod_base = OTHER; note = Locked 5-methylcytosine with phosphorothioate linkage
  modified_base 18: mod_base = OTHER; note = Locked nucleic acid
gcctcgttctctttcgct

SEQ ID NO: 361 - DNA, 18 bp, synthetic construct
  source 1..18: mol_type = other DNA
  modified_base 1: mod_base = OTHER; note = Locked nucleic acid with phosphorothioate linkage
  modified_base 2: mod_base = OTHER; note = Locked 5-methylcytosine with phosphorothioate linkage
  modified_base 3: mod_base = OTHER; note = Locked nucleic acid with phosphorothioate linkage
  modified_base 4: mod_base = OTHER; note = Nucleotide with phosphorothioate linkage
  modified_base 5: mod_base = OTHER; note = Nucleotide with phosphorothioate linkage
  modified_base 6: mod_base = OTHER; note = Nucleotide with phosphorothioate linkage
  modified_base 7: mod_base = OTHER; note = 5-methylcytosine with phosphorothioate linkage
  modified_base 8: mod_base = OTHER; note = Nucleotide with phosphorothioate linkage
  modified_base 9: mod_base = OTHER; note = Nucleotide with phosphorothioate linkage
  modified_base 10: mod_base = OTHER; note = Nucleotide with phosphorothioate linkage
  modified_base 11: mod_base = OTHER; note = Nucleotide with phosphorothioate linkage
  modified_base 12: mod_base = OTHER; note = Nucleotide with phosphorothioate linkage
  modified_base 13: mod_base = OTHER; note = 5-methylcytosine with phosphorothioate linkage
  modified_base 14: mod_base = OTHER; note = Nucleotide with phosphorothioate linkage
  modified_base 15: mod_base = OTHER; note = 5-methylcytosine with phosphorothioate linkage
  modified_base 16: mod_base = OTHER; note = Locked 5-methylcytosine with phosphorothioate linkage
  modified_base 17: mod_base = OTHER; note = Locked 5-methylcytosine with phosphorothioate linkage
  modified_base 18: mod_base = OTHER; note = Locked nucleic acid
actggtcgtagtcgccct

SEQ ID NO: 362 - DNA, 18 bp, synthetic construct
  source 1..18: mol_type = other DNA
  modified_base 1: mod_base = OTHER; note = Locked nucleic acid with phosphorothioate linkage
  modified_base 2: mod_base = OTHER; note = Locked 5-methylcytosine with phosphorothioate linkage
  modified_base 3: mod_base = OTHER; note = Locked nucleic acid with phosphorothioate linkage
  modified_base 4: mod_base = OTHER; note = 5-methylcytosine with phosphorothioate linkage
  modified_base 5: mod_base = OTHER; note = Nucleotide with phosphorothioate linkage
  modified_base 6: mod_base = OTHER; note = Nucleotide with phosphorothioate linkage
  modified_base 7: mod_base = OTHER; note = Nucleotide with phosphorothioate linkage
  modified_base 8: mod_base = OTHER; note = Nucleotide with phosphorothioate linkage
  modified_base 9: mod_base = OTHER; note = 5-methylcytosine with phosphorothioate linkage
  modified_base 10: mod_base = OTHER; note = Nucleotide with phosphorothioate linkage
  modified_base 11: mod_base = OTHER; note = Nucleotide with phosphorothioate linkage
  modified_base 12: mod_base = OTHER; note = Nucleotide with phosphorothioate linkage
  modified_base 13: mod_base = OTHER; note = Nucleotide with phosphorothioate linkage
  modified_base 14: mod_base = OTHER; note = Nucleotide with phosphorothioate linkage
  modified_base 15: mod_base = OTHER; note = 5-methylcytosine with phosphorothioate linkage
  modified_base 16: mod_base = OTHER; note = Locked nucleic acid with phosphorothioate linkage
  modified_base 17: mod_base = OTHER; note = Locked 5-methylcytosine with phosphorothioate linkage
  modified_base 18: mod_base = OTHER; note = Locked 5-methylcytosine
tcactggtcgtagtcgcc

SEQ ID NO: 363 - DNA, 18 bp, synthetic construct
  source 1..18: mol_type = other DNA
  modified_base 1: mod_base = OTHER; note = Locked 5-methylcytosine with phosphorothioate linkage
  modified_base 2: mod_base = OTHER; note = Locked 5-methylcytosine with phosphorothioate linkage
  modified_base 3: mod_base = OTHER; note = Locked nucleic acid with phosphorothioate linkage
  modified_base 4: mod_base = OTHER; note = Nucleotide with phosphorothioate linkage
  modified_base 5: mod_base = OTHER; note = Nucleotide with phosphorothioate linkage
  modified_base 6: mod_base = OTHER; note = 5-methylcytosine with phosphorothioate linkage
  modified_base 7: mod_base = OTHER; note = Nucleotide with phosphorothioate linkage
  modified_base 8: mod_base = OTHER; note = Nucleotide with phosphorothioate linkage
  modified_base 9: mod_base = OTHER; note = Nucleotide with phosphorothioate linkage
  modified_base 10: mod_base = OTHER; note = Nucleotide with phosphorothioate linkage
  modified_base 11: mod_base = OTHER; note = Nucleotide with phosphorothioate linkage
  modified_base 12: mod_base = OTHER; note = 5-methylcytosine with phosphorothioate linkage
  modified_base 13: mod_base = OTHER; note = 5-methylcytosine with phosphorothioate linkage
  modified_base 14: mod_base = OTHER; note = 5-methylcytosine with phosphorothioate linkage
  modified_base 15: mod_base = OTHER; note = 5-methylcytosine with phosphorothioate linkage
  modified_base 16: mod_base = OTHER; note = Locked nucleic acid with phosphorothioate linkage
  modified_base 17: mod_base = OTHER; note = Locked nucleic acid with phosphorothioate linkage
  modified_base 18: mod_base = OTHER; note = Locked 5-methylcytosine
cctgtctggggccccggc

SEQ ID NO: 364 - DNA, 18 bp, synthetic construct
  source 1..18: mol_type = other DNA
  modified_base 1: mod_base = OTHER; note = Locked 5-methylcytosine with phosphorothioate linkage
  modified_base 2: mod_base = OTHER; note = Locked 5-methylcytosine with phosphorothioate linkage
  modified_base 3: mod_base = OTHER; note = Locked nucleic acid with phosphorothioate linkage
  modified_base 4: mod_base = OTHER; note = Nucleotide with phosphorothioate linkage
  modified_base 5: mod_base = OTHER; note = Nucleotide with phosphorothioate linkage
  modified_base 6: mod_base = OTHER; note = 5-methylcytosine with phosphorothioate linkage
  modified_base 7: mod_base = OTHER; note = Nucleotide with phosphorothioate linkage
  modified_base 8: mod_base = OTHER; note = Nucleotide with phosphorothioate linkage
  modified_base 9: mod_base = OTHER; note = 5-methylcytosine with phosphorothioate linkage
  modified_base 10: mod_base = OTHER; note = Nucleotide with phosphorothioate linkage
  modified_base 11: mod_base = OTHER; note = Nucleotide with phosphorothioate linkage
  modified_base 12: mod_base = OTHER; note = Nucleotide with phosphorothioate linkage
  modified_base 13: mod_base = OTHER; note = Nucleotide with phosphorothioate linkage
  modified_base 14: mod_base = OTHER; note = Nucleotide with phosphorothioate linkage
  modified_base 15: mod_base = OTHER; note = Nucleotide with phosphorothioate linkage
  modified_base 16: mod_base = OTHER; note = Locked nucleic acid with phosphorothioate linkage
  modified_base 17: mod_base = OTHER; note = Locked 5-methylcytosine with phosphorothioate linkage
  modified_base 18: mod_base = OTHER; note = Locked nucleic acid
ccaaacttctgaggagct

SEQ ID NO: 365 - DNA, 18 bp, synthetic construct
  source 1..18: mol_type = other DNA
  modified_base 1: mod_base = OTHER; note = Locked 5-methylcytosine with phosphorothioate linkage
  modified_base 2: mod_base = OTHER; note = Locked nucleic acid with phosphorothioate linkage
  modified_base 3: mod_base = OTHER; note = Locked nucleic acid with phosphorothioate linkage
  modified_base 4: mod_base = OTHER; note = Nucleotide with phosphorothioate linkage
  modified_base 5: mod_base = OTHER; note = 5-methylcytosine with phosphorothioate linkage
  modified_base 6: mod_base = OTHER; note = Nucleotide with phosphorothioate linkage
  modified_base 7: mod_base = OTHER; note = Nucleotide with phosphorothioate linkage
  modified_base 8: mod_base = OTHER; note = 5-methylcytosine with phosphorothioate linkage
  modified_base 9: mod_base = OTHER; note = Nucleotide with phosphorothioate linkage
  modified_base 10: mod_base = OTHER; note = Nucleotide with phosphorothioate linkage
  modified_base 11: mod_base = OTHER; note = 5-methylcytosine with phosphorothioate linkage
  modified_base 12: mod_base = OTHER; note = 5-methylcytosine with phosphorothioate linkage
  modified_base 13: mod_base = OTHER; note = Nucleotide with phosphorothioate linkage
  modified_base 14: mod_base = OTHER; note = Nucleotide with phosphorothioate linkage
  modified_base 15: mod_base = OTHER; note = Nucleotide with phosphorothioate linkage
  modified_base 16: mod_base = OTHER; note = Locked nucleic acid with phosphorothioate linkage
  modified_base 17: mod_base = OTHER; note = Locked nucleic acid with phosphorothioate linkage
  modified_base 18: mod_base = OTHER; note = Locked 5-methylcytosine
ctagctgctaccttgatc

SEQ ID NO: 366 - DNA, 18 bp, synthetic construct
  source 1..18: mol_type = other DNA
  modified_base 1: mod_base = OTHER; note = Locked nucleic acid with phosphorothioate linkage
  modified_base 2: mod_base = OTHER; note = Locked nucleic acid with phosphorothioate linkage
  modified_base 3: mod_base = OTHER; note = Locked nucleic acid with phosphorothioate linkage
  modified_base 4: mod_base = OTHER; note = Nucleotide with phosphorothioate linkage
  modified_base 5: mod_base = OTHER; note = Nucleotide with phosphorothioate linkage
  modified_base 6: mod_base = OTHER; note = Nucleotide with phosphorothioate linkage
  modified_base 7: mod_base = OTHER; note = Nucleotide with phosphorothioate linkage
  modified_base 8: mod_base = OTHER; note = 5-methylcytosine with phosphorothioate linkage
  modified_base 9: mod_base = OTHER; note = Nucleotide with phosphorothioate linkage
  modified_base 10: mod_base = OTHER; note = 5-methylcytosine with phosphorothioate linkage
  modified_base 11: mod_base = OTHER; note = Nucleotide with phosphorothioate linkage
  modified_base 12: mod_base = OTHER; note = 5-methylcytosine with phosphorothioate linkage
  modified_base 13: mod_base = OTHER; note = 5-methylcytosine with phosphorothioate linkage
  modified_base 14: mod_base = OTHER; note = Nucleotide with phosphorothioate linkage
  modified_base 15: mod_base = OTHER; note = Nucleotide with phosphorothioate linkage
  modified_base 16: mod_base = OTHER; note = Locked nucleic acid with phosphorothioate linkage
  modified_base 17: mod_base = OTHER; note = Locked 5-methylcytosine with phosphorothioate linkage
  modified_base 18: mod_base = OTHER; note = Locked nucleic acid
aggttgtcacaccagtct

SEQ ID NO: 367 - DNA, 18 bp, synthetic construct
  source 1..18: mol_type = other DNA
  modified_base 1: mod_base = OTHER; note = Locked nucleic acid with phosphorothioate linkage
  modified_base 2: mod_base = OTHER; note = Locked nucleic acid with phosphorothioate linkage
  modified_base 3: mod_base = OTHER; note = Locked 5-methylcytosine with phosphorothioate linkage
  modified_base 4: mod_base = OTHER; note = 5-methylcytosine with phosphorothioate linkage
  modified_base 5: mod_base = OTHER; note = Nucleotide with phosphorothioate linkage
  modified_base 6: mod_base = OTHER; note = Nucleotide with phosphorothioate linkage
  modified_base 7: mod_base = OTHER; note = Nucleotide with phosphorothioate linkage
  modified_base 8: mod_base = OTHER; note = 5-methylcytosine with phosphorothioate linkage
  modified_base 9: mod_base = OTHER; note = Nucleotide with phosphorothioate linkage
  modified_base 10: mod_base = OTHER; note = Nucleotide with phosphorothioate linkage
  modified_base 11: mod_base = OTHER; note = Nucleotide with phosphorothioate linkage
  modified_base 12: mod_base = OTHER; note = Nucleotide with phosphorothioate linkage
  modified_base 13: mod_base = OTHER; note = Nucleotide with phosphorothioate linkage
  modified_base 14: mod_base = OTHER; note = 5-methylcytosine with phosphorothioate linkage
  modified_base 15: mod_base = OTHER; note = Nucleotide with phosphorothioate linkage
  modified_base 16: mod_base = OTHER; note = Locked nucleic acid with phosphorothioate linkage
  modified_base 17: mod_base = OTHER; note = Locked 5-methylcytosine with phosphorothioate linkage
  modified_base 18: mod_base = OTHER; note = Locked nucleic acid
ggccattcggtgacatca

SEQ ID NO: 368 - DNA, 18 bp, synthetic construct
  source 1..18: mol_type = other DNA
  modified_base 1: mod_base = OTHER; note = Locked nucleic acid with phosphorothioate linkage
  modified_base 2: mod_base = OTHER; note = Locked nucleic acid with phosphorothioate linkage
  modified_base 3: mod_base = OTHER; note = Locked nucleic acid with phosphorothioate linkage
  modified_base 4: mod_base = OTHER; note = 5-methylcytosine with phosphorothioate linkage
  modified_base 5: mod_base = OTHER; note = 5-methylcytosine with phosphorothioate linkage
  modified_base 6: mod_base = OTHER; note = Nucleotide with phosphorothioate linkage
  modified_base 7: mod_base = OTHER; note = Nucleotide with phosphorothioate linkage
  modified_base 8: mod_base = OTHER; note = Nucleotide with phosphorothioate linkage
  modified_base 9: mod_base = OTHER; note = 5-methylcytosine with phosphorothioate linkage
  modified_base 10: mod_base = OTHER; note = Nucleotide with phosphorothioate linkage
  modified_base 11: mod_base = OTHER; note = Nucleotide with phosphorothioate linkage
  modified_base 12: mod_base = OTHER; note = Nucleotide with phosphorothioate linkage
  modified_base 13: mod_base = OTHER; note = Nucleotide with phosphorothioate linkage
  modified_base 14: mod_base = OTHER; note = Nucleotide with phosphorothioate linkage
  modified_base 15: mod_base = OTHER; note = 5-methylcytosine with phosphorothioate linkage
  modified_base 16: mod_base = OTHER; note = Locked nucleic acid with phosphorothioate linkage
  modified_base 17: mod_base = OTHER; note = Locked nucleic acid with phosphorothioate linkage
  modified_base 18: mod_base = OTHER; note = Locked 5-methylcytosine
tggccattcggtgacatc

SEQ ID NO: 369 - DNA, 18 bp, synthetic construct
  source 1..18: mol_type = other DNA
  modified_base 1: mod_base = OTHER; note = Locked nucleic acid with phosphorothioate linkage
  modified_base 2: mod_base = OTHER; note = Locked nucleic acid with phosphorothioate linkage
  modified_base 3: mod_base = OTHER; note = Locked 5-methylcytosine with phosphorothioate linkage
  modified_base 4: mod_base = OTHER; note = Nucleotide with phosphorothioate linkage
  modified_base 5: mod_base = OTHER; note = Nucleotide with phosphorothioate linkage
  modified_base 6: mod_base = OTHER; note = Nucleotide with phosphorothioate linkage
  modified_base 7: mod_base = OTHER; note = 5-methylcytosine with phosphorothioate linkage
  modified_base 8: mod_base = OTHER; note = Nucleotide with phosphorothioate linkage
  modified_base 9: mod_base = OTHER; note = Nucleotide with phosphorothioate linkage
  modified_base 10: mod_base = OTHER; note = Nucleotide with phosphorothioate linkage
  modified_base 11: mod_base = OTHER; note = Nucleotide with phosphorothioate linkage
  modified_base 12: mod_base = OTHER; note = Nucleotide with phosphorothioate linkage
  modified_base 13: mod_base = OTHER; note = 5-methylcytosine with phosphorothioate linkage
  modified_base 14: mod_base = OTHER; note = 5-methylcytosine with phosphorothioate linkage
  modified_base 15: mod_base = OTHER; note = Nucleotide with phosphorothioate linkage
  modified_base 16: mod_base = OTHER; note = Locked nucleic acid with phosphorothioate linkage
  modified_base 17: mod_base = OTHER; note = Locked nucleic acid with phosphorothioate linkage
  modified_base 18: mod_base = OTHER; note = Locked 5-methylcytosine
tacaagctgtggccattc

SEQ ID NO: 370 - DNA, 18 bp, synthetic construct
  source 1..18: mol_type = other DNA
  modified_base 1: mod_base = OTHER; note = Locked 5-methylcytosine with phosphorothioate linkage
  modified_base 2: mod_base = OTHER; note = Locked nucleic acid with phosphorothioate linkage
  modified_base 3: mod_base = OTHER; note = Locked nucleic acid with phosphorothioate linkage
  modified_base 4: mod_base = OTHER; note = Nucleotide with phosphorothioate linkage
  modified_base 5: mod_base = OTHER; note = Nucleotide with phosphorothioate linkage
  modified_base 6: mod_base = OTHER; note = Nucleotide with phosphorothioate linkage
  modified_base 7: mod_base = OTHER; note = 5-methylcytosine with phosphorothioate linkage
  modified_base 8: mod_base = OTHER; note = Nucleotide with phosphorothioate linkage
  modified_base 9: mod_base = OTHER; note = Nucleotide with phosphorothioate linkage
  modified_base 10: mod_base = OTHER; note = Nucleotide with phosphorothioate linkage
  modified_base 11: mod_base = OTHER; note = 5-methylcytosine with phosphorothioate linkage
  modified_base 12: mod_base = OTHER; note = Nucleotide with phosphorothioate linkage
  modified_base 13: mod_base = OTHER; note = Nucleotide with phosphorothioate linkage
  modified_base 14: mod_base = OTHER; note = Nucleotide with phosphorothioate linkage
  modified_base 15: mod_base = OTHER; note = Nucleotide with phosphorothioate linkage
  modified_base 16: mod_base = OTHER; note = Locked nucleic acid with phosphorothioate linkage
  modified_base 17: mod_base = OTHER; note = Locked 5-methylcytosine with phosphorothioate linkage
  modified_base 18: mod_base = OTHER; note = Locked 5-methylcytosine
cttttacaagctgtggcc

SEQ ID NO: 371 - DNA, 18 bp, synthetic construct
  source 1..18: mol_type = other DNA
  modified_base 1: mod_base = OTHER; note = Locked nucleic acid with phosphorothioate linkage
  modified_base 2: mod_base = OTHER; note = Locked nucleic acid with phosphorothioate linkage
  modified_base 3: mod_base = OTHER; note = Locked 5-methylcytosine with phosphorothioate linkage
  modified_base 4: mod_base = OTHER; note = Nucleotide with phosphorothioate linkage
  modified_base 5: mod_base = OTHER; note = Nucleotide with phosphorothioate linkage
  modified_base 6: mod_base = OTHER; note = Nucleotide with phosphorothioate linkage
  modified_base 7: mod_base = OTHER; note = Nucleotide with phosphorothioate linkage
  modified_base 8: mod_base = OTHER; note = Nucleotide with phosphorothioate linkage
  modified_base 9: mod_base = OTHER; note = Nucleotide with phosphorothioate linkage
  modified_base 10: mod_base = OTHER; note = Nucleotide with phosphorothioate linkage
  modified_base 11: mod_base = OTHER; note = 5-methylcytosine with phosphorothioate linkage
  modified_base 12: mod_base = OTHER; note = Nucleotide with phosphorothioate linkage
  modified_base 13: mod_base = OTHER; note = 5-methylcytosine with phosphorothioate linkage
  modified_base 14: mod_base = OTHER; note = 5-methylcytosine with phosphorothioate linkage
  modified_base 15: mod_base = OTHER; note = Nucleotide with phosphorothioate linkage
  modified_base 16: mod_base = OTHER; note = Locked nucleic acid with phosphorothioate linkage
  modified_base 17: mod_base = OTHER; note = Locked nucleic acid with phosphorothioate linkage
  modified_base 18: mod_base = OTHER; note = Locked nucleic acid
gactgaggttctcctgat

SEQ ID NO: 372 - DNA, 18 bp, synthetic construct
  source 1..18: mol_type = other DNA
  modified_base 1: mod_base = OTHER; note = Locked nucleic acid with phosphorothioate linkage
  modified_base 2: mod_base = OTHER; note = Locked 5-methylcytosine with phosphorothioate linkage
  modified_base 3: mod_base = OTHER; note = Locked nucleic acid with phosphorothioate linkage
  modified_base 4: mod_base = OTHER; note = Nucleotide with phosphorothioate linkage
  modified_base 5: mod_base = OTHER; note = Nucleotide with phosphorothioate linkage
  modified_base 6: mod_base = OTHER; note = 5-methylcytosine with phosphorothioate linkage
  modified_base 7: mod_base = OTHER; note = Nucleotide with phosphorothioate linkage
  modified_base 8: mod_base = OTHER; note = Nucleotide with phosphorothioate linkage
  modified_base 9: mod_base = OTHER; note = Nucleotide with phosphorothioate linkage
  modified_base 10: mod_base = OTHER; note = Nucleotide with phosphorothioate linkage
  modified_base 11: mod_base = OTHER; note = Nucleotide with phosphorothioate linkage
  modified_base 12: mod_base = OTHER; note = Nucleotide with phosphorothioate linkage
  modified_base 13: mod_base = OTHER; note = Nucleotide with phosphorothioate linkage
  modified_base 14: mod_base = OTHER; note = 5-methylcytosine with phosphorothioate linkage
  modified_base 15: mod_base = OTHER; note = Nucleotide with phosphorothioate linkage
  modified_base 16: mod_base = OTHER; note = Locked 5-methylcytosine with phosphorothioate linkage
  modified_base 17: mod_base = OTHER; note = Locked 5-methylcytosine with phosphorothioate linkage
  modified_base 18: mod_base = OTHER; note = Locked nucleic acid
tcagactgaggttctcct

SEQ ID NO: 373 - DNA, 18 bp, synthetic construct
  source 1..18: mol_type = other DNA
  modified_base 1: mod_base = OTHER; note = Locked nucleic acid with phosphorothioate linkage
  modified_base 2: mod_base = OTHER; note = Locked 5-methylcytosine with phosphorothioate linkage
  modified_base 3: mod_base = OTHER; note = Locked nucleic acid with phosphorothioate linkage
  modified_base 4: mod_base = OTHER; note = Nucleotide with phosphorothioate linkage
  modified_base 5: mod_base = OTHER; note = Nucleotide with phosphorothioate linkage
  modified_base 6: mod_base = OTHER; note = 5-methylcytosine with phosphorothioate linkage
  modified_base 7: mod_base = OTHER; note = Nucleotide with phosphorothioate linkage
  modified_base 8: mod_base = OTHER; note = Nucleotide with phosphorothioate linkage
  modified_base 9: mod_base = OTHER; note = Nucleotide with phosphorothioate linkage
  modified_base 10: mod_base = OTHER; note = Nucleotide with phosphorothioate linkage
  modified_base 11: mod_base = OTHER; note = Nucleotide with phosphorothioate linkage
  modified_base 12: mod_base = OTHER; note = Nucleotide with phosphorothioate linkage
  modified_base 13: mod_base = OTHER; note = Nucleotide with phosphorothioate linkage
  modified_base 14: mod_base = OTHER; note = 5-methylcytosine with phosphorothioate linkage
  modified_base 15: mod_base = OTHER; note = Nucleotide with phosphorothioate linkage
  modified_base 16: mod_base = OTHER; note = Locked 5-methylcytosine with phosphorothioate linkage
  modified_base 17: mod_base = OTHER; note = Locked 5-methylcytosine with phosphorothioate linkage
  modified_base 18: mod_base = OTHER; note = Locked 5-methylcytosine
tcagactgaggttctccc

SEQ ID NO: 374 - DNA, 18 bp, synthetic construct
  source 1..18: mol_type = other DNA
  modified_base 1: mod_base = OTHER; note = Locked nucleic acid with phosphorothioate linkage
  modified_base 2: mod_base = OTHER; note = Locked 5-methylcytosine with phosphorothioate linkage
  modified_base 3: mod_base = OTHER; note = Locked nucleic acid with phosphorothioate linkage
  modified_base 4: mod_base = OTHER; note = Nucleotide with phosphorothioate linkage
  modified_base 5: mod_base = OTHER; note = Nucleotide with phosphorothioate linkage
  modified_base 6: mod_base = OTHER; note = 5-methylcytosine with phosphorothioate linkage
  modified_base 7: mod_base = OTHER; note = Nucleotide with phosphorothioate linkage
  modified_base 8: mod_base = OTHER; note = Nucleotide with phosphorothioate linkage
  modified_base 9: mod_base = OTHER; note = Nucleotide with phosphorothioate linkage
  modified_base 10: mod_base = OTHER; note = 5-methylcytosine with phosphorothioate linkage
  modified_base 11: mod_base = OTHER; note = Nucleotide with phosphorothioate linkage
  modified_base 12: mod_base = OTHER; note = Nucleotide with phosphorothioate linkage
  modified_base 13: mod_base = OTHER; note = Nucleotide with phosphorothioate linkage
  modified_base 14: mod_base = OTHER; note = 5-methylcytosine with phosphorothioate linkage
  modified_base 15: mod_base = OTHER; note = Nucleotide with phosphorothioate linkage
  modified_base 16: mod_base = OTHER; note = Locked 5-methylcytosine with phosphorothioate linkage
  modified_base 17: mod_base = OTHER; note = Locked 5-methylcytosine with phosphorothioate linkage
  modified_base 18: mod_base = OTHER; note = Locked nucleic acid
tcagactgacgttctcct

SEQ ID NO: 375 - DNA, 18 bp, synthetic construct
  source 1..18: mol_type = other DNA
  modified_base 1: mod_base = OTHER; note = Locked 5-methylcytosine with phosphorothioate linkage
  modified_base 2: mod_base = OTHER; note = Locked nucleic acid with phosphorothioate linkage
  modified_base 3: mod_base = OTHER; note = Locked nucleic acid with phosphorothioate linkage
  modified_base 4: mod_base = OTHER; note = 5-methylcytosine with phosphorothioate linkage
  modified_base 5: mod_base = OTHER; note = Nucleotide with phosphorothioate linkage
  modified_base 6: mod_base = OTHER; note = Nucleotide with phosphorothioate linkage
  modified_base 7: mod_base = OTHER; note = Nucleotide with phosphorothioate linkage
  modified_base 8: mod_base = OTHER; note = 5-methylcytosine with phosphorothioate linkage
  modified_base 9: mod_base = OTHER; note = Nucleotide with phosphorothioate linkage
  modified_base 10: mod_base = OTHER; note = Nucleotide with phosphorothioate linkage
  modified_base 11: mod_base = OTHER; note = Nucleotide with phosphorothioate linkage
  modified_base 12: mod_base = OTHER; note = Nucleotide with phosphorothioate linkage
  modified_base 13: mod_base = OTHER; note = Nucleotide with phosphorothioate linkage
  modified_base 14: mod_base = OTHER; note = Nucleotide with phosphorothioate linkage
  modified_base 15: mod_base = OTHER; note = Nucleotide with phosphorothioate linkage
  modified_base 16: mod_base = OTHER; note = Locked 5-methylcytosine with phosphorothioate linkage
  modified_base 17: mod_base = OTHER; note = Locked nucleic acid with phosphorothioate linkage
  modified_base 18: mod_base = OTHER; note = Locked 5-methylcytosine
cgtcagactgaggttctc

SEQ ID NO: 376 - DNA, 18 bp, synthetic construct
  source 1..18: mol_type = other DNA
  modified_base 1: mod_base = OTHER; note = Locked nucleic acid with phosphorothioate linkage
  modified_base 2: mod_base = OTHER; note = Locked nucleic acid with phosphorothioate linkage
  modified_base 3: mod_base = OTHER; note = Locked 5-methylcytosine with phosphorothioate linkage
  modified_base 4: mod_base = OTHER; note = Nucleotide with phosphorothioate linkage
  modified_base 5: mod_base = OTHER; note = Nucleotide with phosphorothioate linkage
  modified_base 6: mod_base = OTHER; note = 5-methylcytosine with phosphorothioate linkage
  modified_base 7: mod_base = OTHER; note = Nucleotide with phosphorothioate linkage
  modified_base 8: mod_base = OTHER; note = Nucleotide with phosphorothioate linkage
  modified_base 9: mod_base = OTHER; note = Nucleotide with phosphorothioate linkage
  modified_base 10: mod_base = OTHER; note = 5-methylcytosine with phosphorothioate linkage
  modified_base 11: mod_base = OTHER; note = Nucleotide with phosphorothioate linkage
  modified_base 12: mod_base = OTHER; note = Nucleotide with phosphorothioate linkage
  modified_base 13: mod_base = OTHER; note = Nucleotide with phosphorothioate linkage
  modified_base 14: mod_base = OTHER; note = Nucleotide with phosphorothioate linkage
  modified_base 15: mod_base = OTHER; note = Nucleotide with phosphorothioate linkage
  modified_base 16: mod_base = OTHER; note = Locked nucleic acid with phosphorothioate linkage
  modified_base 17: mod_base = OTHER; note = Locked nucleic acid with phosphorothioate linkage
  modified_base 18: mod_base = OTHER; note = Locked 5-methylcytosine
gtcgtcagactgaggttc

SEQ ID NO: 377 - DNA, 18 bp, synthetic construct
  source 1..18: mol_type = other DNA
  modified_base 1: mod_base = OTHER; note = Locked nucleic acid with phosphorothioate linkage
  modified_base 2: mod_base = OTHER; note = Locked nucleic acid with phosphorothioate linkage
  modified_base 3: mod_base = OTHER; note = Locked nucleic acid with phosphorothioate linkage
  modified_base 4: mod_base = OTHER; note = 5-methylcytosine with phosphorothioate linkage
  modified_base 5: mod_base = OTHER; note = Nucleotide with phosphorothioate linkage
  modified_base 6: mod_base = OTHER; note = Nucleotide with phosphorothioate linkage
  modified_base 7: mod_base = OTHER; note = 5-methylcytosine with phosphorothioate linkage
  modified_base 8: mod_base = OTHER; note = Nucleotide with phosphorothioate linkage
  modified_base 9: mod_base = OTHER; note = Nucleotide with phosphorothioate linkage
  modified_base 10: mod_base = OTHER; note = Nucleotide with phosphorothioate linkage
  modified_base 11: mod_base = OTHER; note = 5-methylcytosine with phosphorothioate linkage
  modified_base 12: mod_base = OTHER; note = Nucleotide with phosphorothioate linkage
  modified_base 13: mod_base = OTHER; note = Nucleotide with phosphorothioate linkage
  modified_base 14: mod_base = OTHER; note = Nucleotide with phosphorothioate linkage
  modified_base 15: mod_base = OTHER; note = Nucleotide with phosphorothioate linkage
  modified_base 16: mod_base = OTHER; note = Locked nucleic acid with phosphorothioate linkage
  modified_base 17: mod_base = OTHER; note = Locked nucleic acid with phosphorothioate linkage
  modified_base 18: mod_base = OTHER; note = Locked nucleic acid
tgtcgtcagactgaggtt

SEQ ID NO: 378 - DNA, 18 bp, synthetic construct
  source 1..18: mol_type = other DNA
  modified_base 1: mod_base = OTHER; note = Locked nucleic acid with phosphorothioate linkage
  modified_base 2: mod_base = OTHER; note = Locked 5-methylcytosine with phosphorothioate linkage
  modified_base 3: mod_base = OTHER; note = Locked nucleic acid with phosphorothioate linkage
  modified_base 4: mod_base = OTHER; note = Nucleotide with phosphorothioate linkage
  modified_base 5: mod_base = OTHER; note = 5-methylcytosine with phosphorothioate linkage
  modified_base 6: mod_base = OTHER; note = Nucleotide with phosphorothioate linkage
  modified_base 7: mod_base = OTHER; note = Nucleotide with phosphorothioate linkage
  modified_base 8: mod_base = OTHER; note = Nucleotide with phosphorothioate linkage
  modified_base 9: mod_base = OTHER; note = Nucleotide with phosphorothioate linkage
  modified_base 10: mod_base = OTHER; note = Nucleotide with phosphorothioate linkage
  modified_base 11: mod_base = OTHER; note = 5-methylcytosine with phosphorothioate linkage
  modified_base 12: mod_base = OTHER; note = Nucleotide with phosphorothioate linkage
  modified_base 13: mod_base = OTHER; note = Nucleotide with phosphorothioate linkage
  modified_base 14: mod_base = OTHER; note = 5-methylcytosine with phosphorothioate linkage
  modified_base 15: mod_base = OTHER; note = Nucleotide with phosphorothioate linkage
  modified_base 16: mod_base = OTHER; note = Locked nucleic acid with phosphorothioate linkage
  modified_base 17: mod_base = OTHER; note = Locked nucleic acid with phosphorothioate linkage
  modified_base 18: mod_base = OTHER; note = Locked 5-methylcytosine
gcttcaatgtcgtcagac

SEQ ID NO: 379 - DNA, 18 bp, synthetic construct
  source 1..18: mol_type = other DNA
  modified_base 1: mod_base = OTHER; note = Locked nucleic acid with phosphorothioate linkage
  modified_base 2: mod_base = OTHER; note = Locked 5-methylcytosine with phosphorothioate linkage
  modified_base 3: mod_base = OTHER; note = Locked nucleic acid with phosphorothioate linkage
  modified_base 4: mod_base = OTHER; note = Nucleotide with phosphorothioate linkage
  modified_base 5: mod_base = OTHER; note = Nucleotide with phosphorothioate linkage
  modified_base 6: mod_base = OTHER; note = 5-methylcytosine with phosphorothioate linkage
  modified_base 7: mod_base = OTHER; note = Nucleotide with phosphorothioate linkage
  modified_base 8: mod_base = OTHER; note = Nucleotide with phosphorothioate linkage
  modified_base 9: mod_base = OTHER; note = 5-methylcytosine with phosphorothioate linkage
  modified_base 10: mod_base = OTHER; note = Nucleotide with phosphorothioate linkage
  modified_base 11: mod_base = OTHER; note = Nucleotide with phosphorothioate linkage
  modified_base 12: mod_base = OTHER; note = Nucleotide with phosphorothioate linkage
  modified_base 13: mod_base = OTHER; note = Nucleotide with phosphorothioate linkage
  modified_base 14: mod_base = OTHER; note = Nucleotide with phosphorothioate linkage
  modified_base 15: mod_base = OTHER; note = 5-methylcytosine with phosphorothioate linkage
  modified_base 16: mod_base = OTHER; note = Locked nucleic acid with phosphorothioate linkage
  modified_base 17: mod_base = OTHER; note = Locked nucleic acid with phosphorothioate linkage
  modified_base 18: mod_base = OTHER; note = Locked 5-methylcytosine
gctagcttcaatgtcgtc

SEQ ID NO: 380 - DNA, 18 bp, synthetic construct
  source 1..18: mol_type = other DNA
  modified_base 1: mod_base = OTHER; note = Locked nucleic acid with phosphorothioate linkage
  modified_base 2: mod_base = OTHER; note = Locked 5-methylcytosine with phosphorothioate linkage
  modified_base 3: mod_base = OTHER; note = Locked nucleic acid with phosphorothioate linkage
  modified_base 4: mod_base = OTHER; note = Nucleotide with phosphorothioate linkage
  modified_base 5: mod_base = OTHER; note = 5-methylcytosine with phosphorothioate linkage
  modified_base 6: mod_base = OTHER; note = Nucleotide with phosphorothioate linkage
  modified_base 7: mod_base = OTHER; note = Nucleotide with phosphorothioate linkage
  modified_base 8: mod_base = OTHER; note = Nucleotide with phosphorothioate linkage
  modified_base 9: mod_base = OTHER; note = 5-methylcytosine with phosphorothioate linkage
  modified_base 10: mod_base = OTHER; note = Nucleotide with phosphorothioate linkage
  modified_base 11: mod_base = OTHER; note = Nucleotide with phosphorothioate linkage
  modified_base 12: mod_base = OTHER; note = 5-methylcytosine with phosphorothioate linkage
  modified_base 13: mod_base = OTHER; note = Nucleotide with phosphorothioate linkage
  modified_base 14: mod_base = OTHER; note = Nucleotide with phosphorothioate linkage
  modified_base 15: mod_base = OTHER; note = Nucleotide with phosphorothioate linkage
  modified_base 16: mod_base = OTHER; note = Locked nucleic acid with phosphorothioate linkage
  modified_base 17: mod_base = OTHER; note = Locked nucleic acid with phosphorothioate linkage
  modified_base 18: mod_base = OTHER; note = Locked 5-methylcytosine
tcggctagcttcaatgtc

SEQ ID NO: 381 - DNA, 18 bp, synthetic construct
  source 1..18: mol_type = other DNA
  modified_base 1: mod_base = OTHER; note = Locked nucleic acid with phosphorothioate linkage
  modified_base 2: mod_base = OTHER; note = Locked nucleic acid with phosphorothioate linkage
  modified_base 3: mod_base = OTHER; note = Locked nucleic acid with phosphorothioate linkage
  modified_base 4: mod_base = OTHER; note = Nucleotide with phosphorothioate linkage
  modified_base 5: mod_base = OTHER; note = 5-methylcytosine with phosphorothioate linkage
  modified_base 6: mod_base = OTHER; note = Nucleotide with phosphorothioate linkage
  modified_base 7: mod_base = OTHER; note = Nucleotide with phosphorothioate linkage
  modified_base 8: mod_base = OTHER; note = 5-methylcytosine with phosphorothioate linkage
  modified_base 9: mod_base = OTHER; note = Nucleotide with phosphorothioate linkage
  modified_base 10: mod_base = OTHER; note = Nucleotide with phosphorothioate linkage
  modified_base 11: mod_base = OTHER; note = 5-methylcytosine with phosphorothioate linkage
  modified_base 12: mod_base = OTHER; note = Nucleotide with phosphorothioate linkage
  modified_base 13: mod_base = OTHER; note = 5-methylcytosine with phosphorothioate linkage
  modified_base 14: mod_base = OTHER; note = Nucleotide with phosphorothioate linkage
  modified_base 15: mod_base = OTHER; note = 5-methylcytosine with phosphorothioate linkage
  modified_base 16: mod_base = OTHER; note = Locked nucleic acid with phosphorothioate linkage
  modified_base 17: mod_base = OTHER; note = Locked nucleic acid with phosphorothioate linkage
  modified_base 18: mod_base = OTHER; note = Locked 5-methylcytosine
tttgcagctgctcgcttc

SEQ ID NO: 382 - DNA, 18 bp, synthetic construct
  source 1..18: mol_type = other DNA
  modified_base 1: mod_base = OTHER; note = Locked 5-methylcytosine with phosphorothioate linkage
  modified_base 2: mod_base = OTHER; note = Locked nucleic acid with phosphorothioate linkage
  modified_base 3: mod_base = OTHER; note = Locked nucleic acid with phosphorothioate linkage
  modified_base 4: mod_base = OTHER; note = Nucleotide with phosphorothioate linkage
  modified_base 5: mod_base = OTHER; note = Nucleotide with phosphorothioate linkage
  modified_base 6: mod_base = OTHER; note = 5-methylcytosine with phosphorothioate linkage
  modified_base 7: mod_base = OTHER; note = Nucleotide with phosphorothioate linkage
  modified_base 8: mod_base = OTHER; note = Nucleotide with phosphorothioate linkage
  modified_base 9: mod_base = OTHER; note = 5-methylcytosine with phosphorothioate linkage
  modified_base 10: mod_base = OTHER; note = Nucleotide with phosphorothioate linkage
  modified_base 11: mod_base = OTHER; note = Nucleotide with phosphorothioate linkage
  modified_base 12: mod_base = OTHER; note = 5-methylcytosine with phosphorothioate linkage
  modified_base 13: mod_base = OTHER; note = Nucleotide with phosphorothioate linkage
  modified_base 14: mod_base = OTHER; note = 5-methylcytosine with phosphorothioate linkage
  modified_base 15: mod_base = OTHER; note = Nucleotide with phosphorothioate linkage
  modified_base 16: mod_base = OTHER; note = Locked 5-methylcytosine with phosphorothioate linkage
  modified_base 17: mod_base = OTHER; note = Locked nucleic acid with phosphorothioate linkage
  modified_base 18: mod_base = OTHER; note = Locked nucleic acid
ctttgcagctgctcgctt

SEQ ID NO: 383 - DNA, 18 bp, synthetic construct
  source 1..18: mol_type = other DNA
  modified_base 1: mod_base = OTHER; note = Locked nucleic acid with phosphorothioate linkage
  modified_base 2: mod_base = OTHER; note = Locked 5-methylcytosine with phosphorothioate linkage
  modified_base 3: mod_base = OTHER; note = Locked nucleic acid with phosphorothioate linkage
  modified_base 4: mod_base = OTHER; note = Nucleotide with phosphorothioate linkage
  modified_base 5: mod_base = OTHER; note = Nucleotide with phosphorothioate linkage
  modified_base 6: mod_base = OTHER; note = Nucleotide with phosphorothioate linkage
  modified_base 7: mod_base = OTHER; note = 5-methylcytosine with phosphorothioate linkage
  modified_base 8: mod_base = OTHER; note = Nucleotide with phosphorothioate linkage
  modified_base 9: mod_base = OTHER; note = Nucleotide with phosphorothioate linkage
  modified_base 10: mod_base = OTHER; note = 5-methylcytosine with phosphorothioate linkage
  modified_base 11: mod_base = OTHER; note = Nucleotide with phosphorothioate linkage
  modified_base 12: mod_base = OTHER; note = Nucleotide with phosphorothioate linkage
  modified_base 13: mod_base = OTHER; note = 5-methylcytosine with phosphorothioate linkage
  modified_base 14: mod_base = OTHER; note = Nucleotide with phosphorothioate linkage
  modified_base 15: mod_base = OTHER; note = 5-methylcytosine with phosphorothioate linkage
  modified_base 16: mod_base = OTHER; note = Locked nucleic acid with phosphorothioate linkage
  modified_base 17: mod_base = OTHER; note = Locked 5-methylcytosine with phosphorothioate linkage
  modified_base 18: mod_base = OTHER; note = Locked nucleic acid
gctttgcagctgctcgct

SEQ ID NO: 384 - DNA, 18 bp, synthetic construct
  source 1..18: mol_type = other DNA
  modified_base 1: mod_base = OTHER; note = Locked nucleic acid with phosphorothioate linkage
  modified_base 2: mod_base = OTHER; note = Locked nucleic acid with phosphorothioate linkage
  modified_base 3: mod_base = OTHER; note = Locked nucleic acid with phosphorothioate linkage
  modified_base 4: mod_base = OTHER; note = Nucleotide with phosphorothioate linkage
  modified_base 5: mod_base = OTHER; note = Nucleotide with phosphorothioate linkage
  modified_base 6: mod_base = OTHER; note = 5-methylcytosine with phosphorothioate linkage
  modified_base 7: mod_base = OTHER; note = Nucleotide with phosphorothioate linkage
  modified_base 8: mod_base = OTHER; note = Nucleotide with phosphorothioate linkage
  modified_base 9: mod_base = OTHER; note = Nucleotide with phosphorothioate linkage
  modified_base 10: mod_base = OTHER; note = Nucleotide with phosphorothioate linkage
  modified_base 11: mod_base = OTHER; note = 5-methylcytosine with phosphorothioate linkage
  modified_base 12: mod_base = OTHER; note = Nucleotide with phosphorothioate linkage
  modified_base 13: mod_base = OTHER; note = Nucleotide with phosphorothioate linkage
  modified_base 14: mod_base = OTHER; note = 5-methylcytosine with phosphorothioate linkage
  modified_base 15: mod_base = OTHER; note = Nucleotide with phosphorothioate linkage
  modified_base 16: mod_base = OTHER; note = Locked nucleic acid with phosphorothioate linkage
  modified_base 17: mod_base = OTHER; note = Locked 5-methylcytosine with phosphorothioate linkage
  modified_base 18: mod_base = OTHER; note = Locked nucleic acid
agatgctttgcagctgct

SEQ ID NO: 385 - DNA, 18 bp, synthetic construct
  source 1..18: mol_type = other DNA
  modified_base 1: mod_base = OTHER; note = Locked 5-methylcytosine with phosphorothioate linkage
  modified_base 2: mod_base = OTHER; note = Locked nucleic acid with phosphorothioate linkage
  modified_base 3: mod_base = OTHER; note = Locked nucleic acid with phosphorothioate linkage
  modified_base 4: mod_base = OTHER; note = Nucleotide with phosphorothioate linkage
  modified_base 5: mod_base = OTHER; note = Nucleotide with phosphorothioate linkage
  modified_base 6: mod_base = OTHER; note = Nucleotide with phosphorothioate linkage
  modified_base 7: mod_base = OTHER; note = Nucleotide with phosphorothioate linkage
  modified_base 8: mod_base = OTHER; note = Nucleotide with phosphorothioate linkage
  modified_base 9: mod_base = OTHER; note = Nucleotide with phosphorothioate linkage
  modified_base 10: mod_base = OTHER; note = Nucleotide with phosphorothioate linkage
  modified_base 11: mod_base = OTHER; note = Nucleotide with phosphorothioate linkage
  modified_base 12: mod_base = OTHER; note = Nucleotide with phosphorothioate linkage
  modified_base 13: mod_base = OTHER; note = Nucleotide with phosphorothioate linkage
  modified_base 14: mod_base = OTHER; note = 5-methylcytosine with phosphorothioate linkage
  modified_base 15: mod_base = OTHER; note = Nucleotide with phosphorothioate linkage
  modified_base 16: mod_base = OTHER; note = Locked nucleic acid with phosphorothioate linkage
  modified_base 17: mod_base = OTHER; note = Locked nucleic acid with phosphorothioate linkage
  modified_base 18: mod_base = OTHER; note = Locked 5-methylcytosine
ctggtggtagtagcgttc

SEQ ID NO: 386 - DNA, 18 bp, synthetic construct
  source 1..18: mol_type = other DNA
  modified_base 1: mod_base = OTHER; note = Locked nucleic acid with phosphorothioate linkage
  modified_base 2: mod_base = OTHER; note = Locked 5-methylcytosine with phosphorothioate linkage
  modified_base 3: mod_base = OTHER; note = Locked nucleic acid with phosphorothioate linkage
  modified_base 4: mod_base = OTHER; note = Nucleotide with phosphorothioate linkage
  modified_base 5: mod_base = OTHER; note = Nucleotide with phosphorothioate linkage
  modified_base 6: mod_base = OTHER; note = Nucleotide with phosphorothioate linkage
  modified_base 7: mod_base = OTHER; note = Nucleotide with phosphorothioate linkage
  modified_base 8: mod_base = OTHER; note = Nucleotide with phosphorothioate linkage
  modified_base 9: mod_base = OTHER; note = Nucleotide with phosphorothioate linkage
  modified_base 10: mod_base = OTHER; note = Nucleotide with phosphorothioate linkage
  modified_base 11: mod_base = OTHER; note = Nucleotide with phosphorothioate linkage
  modified_base 12: mod_base = OTHER; note = Nucleotide with phosphorothioate linkage
  modified_base 13: mod_base = OTHER; note = Nucleotide with phosphorothioate linkage
  modified_base 14: mod_base = OTHER; note = Nucleotide with phosphorothioate linkage
  modified_base 15: mod_base = OTHER; note = 5-methylcytosine with phosphorothioate linkage
  modified_base 16: mod_base = OTHER; note = Locked nucleic acid with phosphorothioate linkage
  modified_base 17: mod_base = OTHER; note = Locked nucleic acid with phosphorothioate linkage
  modified_base 18: mod_base = OTHER; note = Locked nucleic acid
actggtggtagtagcgtt

SEQ ID NO: 387 - DNA, 18 bp, synthetic construct
  source 1..18: mol_type = other DNA
  modified_base 1: mod_base = OTHER; note = Locked 5-methylcytosine with phosphorothioate linkage
  modified_base 2: mod_base = OTHER; note = Locked nucleic acid with phosphorothioate linkage
  modified_base 3: mod_base = OTHER; note = Locked 5-methylcytosine with phosphorothioate linkage
  modified_base 4: mod_base = OTHER; note = Nucleotide with phosphorothioate linkage
  modified_base 5: mod_base = OTHER; note = Nucleotide with phosphorothioate linkage
  modified_base 6: mod_base = OTHER; note = 5-methylcytosine with phosphorothioate linkage
  modified_base 7: mod_base = OTHER; note = 5-methylcytosine with phosphorothioate linkage
  modified_base 8: mod_base = OTHER; note = 5-methylcytosine with phosphorothioate linkage
  modified_base 9: mod_base = OTHER; note = Nucleotide with phosphorothioate linkage
  modified_base 10: mod_base = OTHER; note = 5-methylcytosine with phosphorothioate linkage
  modified_base 11: mod_base = OTHER; note = Nucleotide with phosphorothioate linkage
  modified_base 12: mod_base = OTHER; note = Nucleotide with phosphorothioate linkage
  modified_base 13: mod_base = OTHER; note = Nucleotide with phosphorothioate linkage
  modified_base 14: mod_base = OTHER; note = Nucleotide with phosphorothioate linkage
  modified_base 15: mod_base = OTHER; note = Nucleotide with phosphorothioate linkage
  modified_base 16: mod_base = OTHER; note = Locked nucleic acid with phosphorothioate linkage
  modified_base 17: mod_base = OTHER; note = Locked 5-methylcytosine with phosphorothioate linkage
  modified_base 18: mod_base = OTHER; note = Locked nucleic acid
cacagccctcagttaact

SEQ ID NO: 388 - DNA, 18 bp, synthetic construct
  source 1..18: mol_type = other DNA
  modified_base 1: mod_base = OTHER; note = Locked 5-methylcytosine with phosphorothioate linkage
  modified_base 2: mod_base = OTHER; note = Locked 5-methylcytosine with phosphorothioate linkage
  modified_base 3: mod_base = OTHER; note = Locked nucleic acid with phosphorothioate linkage
  modified_base 4: mod_base = OTHER; note = 5-methylcytosine with phosphorothioate linkage
  modified_base 5: mod_base = OTHER; note = Nucleotide with phosphorothioate linkage
  modified_base 6: mod_base = OTHER; note = Nucleotide with phosphorothioate linkage
  modified_base 7: mod_base = OTHER; note = 5-methylcytosine with phosphorothioate linkage
  modified_base 8: mod_base = OTHER; note = 5-methylcytosine with phosphorothioate linkage
  modified_base 9: mod_base = OTHER; note = 5-methylcytosine with phosphorothioate linkage
  modified_base 10: mod_base = OTHER; note = Nucleotide with phosphorothioate linkage
  modified_base 11: mod_base = OTHER; note = 5-methylcytosine with phosphorothioate linkage
  modified_base 12: mod_base = OTHER; note = Nucleotide with phosphorothioate linkage
  modified_base 13: mod_base = OTHER; note = Nucleotide with phosphorothioate linkage
  modified_base 14: mod_base = OTHER; note = Nucleotide with phosphorothioate linkage
  modified_base 15: mod_base = OTHER; note = Nucleotide with phosphorothioate linkage
  modified_base 16: mod_base = OTHER; note = Locked nucleic acid with phosphorothioate linkage
  modified_base 17: mod_base = OTHER; note = Locked nucleic acid with phosphorothioate linkage
  modified_base 18: mod_base = OTHER; note = Locked 5-methylcytosine
ccacagccctcagttaac

SEQ ID NO: 389 - DNA, 18 bp, synthetic construct
  source 1..18: mol_type = other DNA
  modified_base 1: mod_base = OTHER; note = Locked nucleic acid with phosphorothioate linkage
  modified_base 2: mod_base = OTHER; note = Locked 5-methylcytosine with phosphorothioate linkage
  modified_base 3: mod_base = OTHER; note = Locked 5-methylcytosine with phosphorothioate linkage
  modified_base 4: mod_base = OTHER; note = Nucleotide with phosphorothioate linkage
  modified_base 5: mod_base = OTHER; note = 5-methylcytosine with phosphorothioate linkage
  modified_base 6: mod_base = OTHER; note = Nucleotide with phosphorothioate linkage
  modified_base 7: mod_base = OTHER; note = Nucleotide with phosphorothioate linkage
  modified_base 8: mod_base = OTHER; note = 5-methylcytosine with phosphorothioate linkage
  modified_base 9: mod_base = OTHER; note = 5-methylcytosine with phosphorothioate linkage
  modified_base 10: mod_base = OTHER; note = 5-methylcytosine with phosphorothioate linkage
  modified_base 11: mod_base = OTHER; note = Nucleotide with phosphorothioate linkage
  modified_base 12: mod_base = OTHER; note = 5-methylcytosine with phosphorothioate linkage
  modified_base 13: mod_base = OTHER; note = Nucleotide with phosphorothioate linkage
  modified_base 14: mod_base = OTHER; note = Nucleotide with phosphorothioate linkage
  modified_base 15: mod_base = OTHER; note = Nucleotide with phosphorothioate linkage
  modified_base 16: mod_base = OTHER; note = Locked nucleic acid with phosphorothioate linkage
  modified_base 17: mod_base = OTHER; note = Locked nucleic acid with phosphorothioate linkage
  modified_base 18: mod_base = OTHER; note = Locked nucleic acid
tccacagccctcagttaa

SEQ ID NO: 390 - DNA, 18 bp, synthetic construct
  source 1..18: mol_type = other DNA
  modified_base 1: mod_base = OTHER; note = Locked nucleic acid with phosphorothioate linkage
  modified_base 2: mod_base = OTHER; note = Locked nucleic acid with phosphorothioate linkage
  modified_base 3: mod_base = OTHER; note = Locked 5-methylcytosine with phosphorothioate linkage
  modified_base 4: mod_base = OTHER; note = 5-methylcytosine with phosphorothioate linkage
  modified_base 5: mod_base = OTHER; note = Nucleotide with phosphorothioate linkage
  modified_base 6: mod_base = OTHER; note = 5-methylcytosine with phosphorothioate linkage
  modified_base 7: mod_base = OTHER; note = Nucleotide with phosphorothioate linkage
  modified_base 8: mod_base = OTHER; note = Nucleotide with phosphorothioate linkage
  modified_base 9: mod_base = OTHER; note = 5-methylcytosine with phosphorothioate linkage
  modified_base 10: mod_base = OTHER; note = 5-methylcytosine with phosphorothioate linkage
  modified_base 11: mod_base = OTHER; note = 5-methylcytosine with phosphorothioate linkage
  modified_base 12: mod_base = OTHER; note = Nucleotide with phosphorothioate linkage
  modified_base 13: mod_base = OTHER; note = 5-methylcytosine with phosphorothioate linkage
  modified_base 14: mod_base = OTHER; note = Nucleotide with phosphorothioate linkage
  modified_base 15: mod_base = OTHER; note = Nucleotide with phosphorothioate linkage
  modified_base 16: mod_base = OTHER; note = Locked nucleic acid with phosphorothioate linkage
  modified_base 17: mod_base = OTHER; note = Locked nucleic acid with phosphorothioate linkage
  modified_base 18: mod_base = OTHER; note = Locked nucleic acid
ttccacagccctcagtta

SEQ ID NO: 391 - DNA, 18 bp, synthetic construct
  source 1..18: mol_type = other DNA
  modified_base 1: mod_base = OTHER; note = Locked nucleic acid with phosphorothioate linkage
  modified_base 2: mod_base = OTHER; note = Locked 5-methylcytosine with phosphorothioate linkage
  modified_base 3: mod_base = OTHER; note = Locked nucleic acid with phosphorothioate linkage
  modified_base 4: mod_base = OTHER; note = Nucleotide with phosphorothioate linkage
  modified_base 5: mod_base = OTHER; note = Nucleotide with phosphorothioate linkage
  modified_base 6: mod_base = OTHER; note = 5-methylcytosine with phosphorothioate linkage
  modified_base 7: mod_base = OTHER; note = Nucleotide with phosphorothioate linkage
  modified_base 8: mod_base = OTHER; note = Nucleotide with phosphorothioate linkage
  modified_base 9: mod_base = OTHER; note = 5-methylcytosine with phosphorothioate linkage
  modified_base 10: mod_base = OTHER; note = Nucleotide with phosphorothioate linkage
  modified_base 11: mod_base = OTHER; note = Nucleotide with phosphorothioate linkage
  modified_base 12: mod_base = OTHER; note = Nucleotide with phosphorothioate linkage
  modified_base 13: mod_base = OTHER; note = Nucleotide with phosphorothioate linkage
  modified_base 14: mod_base = OTHER; note = 5-methylcytosine with phosphorothioate linkage
  modified_base 15: mod_base = OTHER; note = 5-methylcytosine with phosphorothioate linkage
  modified_base 16: mod_base = OTHER; note = Locked nucleic acid with phosphorothioate linkage
  modified_base 17: mod_base = OTHER; note = Locked 5-methylcytosine with phosphorothioate linkage
  modified_base 18: mod_base = OTHER; note = Locked nucleic acid
gcaggcttcatttccaca

SEQ ID NO: 392 - DNA, 18 bp, synthetic construct
  source 1..18: mol_type = other DNA
  modified_base 1: mod_base = OTHER; note = Locked nucleic acid with phosphorothioate linkage
  modified_base 2: mod_base = OTHER; note = Locked nucleic acid with phosphorothioate linkage
  modified_base 3: mod_base = OTHER; note = Locked 5-methylcytosine with phosphorothioate linkage
  modified_base 4: mod_base = OTHER; note = Nucleotide with phosphorothioate linkage
  modified_base 5: mod_base = OTHER; note = Nucleotide with phosphorothioate linkage
  modified_base 6: mod_base = OTHER; note = Nucleotide with phosphorothioate linkage
  modified_base 7: mod_base = OTHER; note = 5-methylcytosine with phosphorothioate linkage
  modified_base 8: mod_base = OTHER; note = Nucleotide with phosphorothioate linkage
  modified_base 9: mod_base = OTHER; note = Nucleotide with phosphorothioate linkage
  modified_base 10: mod_base = OTHER; note = 5-methylcytosine with phosphorothioate linkage
  modified_base 11: mod_base = OTHER; note = Nucleotide with phosphorothioate linkage
  modified_base 12: mod_base = OTHER; note = Nucleotide with phosphorothioate linkage
  modified_base 13: mod_base = OTHER; note = Nucleotide with phosphorothioate linkage
  modified_base 14: mod_base = OTHER; note = Nucleotide with phosphorothioate linkage
  modified_base 15: mod_base = OTHER; note = 5-methylcytosine with phosphorothioate linkage
  modified_base 16: mod_base = OTHER; note = Locked 5-methylcytosine with phosphorothioate linkage
  modified_base 17: mod_base = OTHER; note = Locked nucleic acid with phosphorothioate linkage
  modified_base 18: mod_base = OTHER; note = Locked 5-methylcytosine
tgcaggcttcatttccac

SEQ ID NO: 393 - DNA, 18 bp, synthetic construct
  source 1..18: mol_type = other DNA
  modified_base 1: mod_base = OTHER; note = Locked nucleic acid with phosphorothioate linkage
  modified_base 2: mod_base = OTHER; note = Locked nucleic acid with phosphorothioate linkage
  modified_base 3: mod_base = OTHER; note = Locked nucleic acid with phosphorothioate linkage
  modified_base 4: mod_base = OTHER; note = 5-methylcytosine with phosphorothioate linkage
  modified_base 5: mod_base = OTHER; note = Nucleotide with phosphorothioate linkage
  modified_base 6: mod_base = OTHER; note = Nucleotide with phosphorothioate linkage
  modified_base 7: mod_base = OTHER; note = Nucleotide with phosphorothioate linkage
  modified_base 8: mod_base = OTHER; note = 5-methylcytosine with phosphorothioate linkage
  modified_base 9: mod_base = OTHER; note = Nucleotide with phosphorothioate linkage
  modified_base 10: mod_base = OTHER; note = Nucleotide with phosphorothioate linkage
  modified_base 11: mod_base = OTHER; note = 5-methylcytosine with phosphorothioate linkage
  modified_base 12: mod_base = OTHER; note = Nucleotide with phosphorothioate linkage
  modified_base 13: mod_base = OTHER; note = Nucleotide with phosphorothioate linkage
  modified_base 14: mod_base = OTHER; note = Nucleotide with phosphorothioate linkage
  modified_base 15: mod_base = OTHER; note = Nucleotide with phosphorothioate linkage
  modified_base 16: mod_base = OTHER; note = Locked 5-methylcytosine with phosphorothioate linkage
  modified_base 17: mod_base = OTHER; note = Locked 5-methylcytosine with phosphorothioate linkage
  modified_base 18: mod_base = OTHER; note = Locked nucleic acid
gtgcaggcttcatttcca

SEQ ID NO: 394 - DNA, 18 bp, synthetic construct
  source 1..18: mol_type = other DNA
  modified_base 1: mod_base = OTHER; note = Locked 5-methylcytosine with phosphorothioate linkage
  modified_base 2: mod_base = OTHER; note = Locked nucleic acid with phosphorothioate linkage
  modified_base 3: mod_base = OTHER; note = Locked nucleic acid with phosphorothioate linkage
  modified_base 4: mod_base = OTHER; note = Nucleotide with phosphorothioate linkage
  modified_base 5: mod_base = OTHER; note = 5-methylcytosine with phosphorothioate linkage
  modified_base 6: mod_base = OTHER; note = Nucleotide with phosphorothioate linkage
  modified_base 7: mod_base = OTHER; note = Nucleotide with phosphorothioate linkage
  modified_base 8: mod_base = OTHER; note = Nucleotide with phosphorothioate linkage
  modified_base 9: mod_base = OTHER; note = 5-methylcytosine with phosphorothioate linkage
  modified_base 10: mod_base = OTHER; note = Nucleotide with phosphorothioate linkage
  modified_base 11: mod_base = OTHER; note = Nucleotide with phosphorothioate linkage
  modified_base 12: mod_base = OTHER; note = 5-methylcytosine with phosphorothioate linkage
  modified_base 13: mod_base = OTHER; note = Nucleotide with phosphorothioate linkage
  modified_base 14: mod_base = OTHER; note = Nucleotide with phosphorothioate linkage
  modified_base 15: mod_base = OTHER; note = Nucleotide with phosphorothioate linkage
  modified_base 16: mod_base = OTHER; note = Locked nucleic acid with phosphorothioate linkage
  modified_base 17: mod_base = OTHER; note = Locked 5-methylcytosine with phosphorothioate linkage
  modified_base 18: mod_base = OTHER; note = Locked 5-methylcytosine
cgtgcaggcttcatttcc

SEQ ID NO: 395 - DNA, 18 bp, synthetic construct
  source 1..18: mol_type = other DNA
  modified_base 1: mod_base = OTHER; note = Locked nucleic acid with phosphorothioate linkage
  modified_base 2: mod_base = OTHER; note = Locked 5-methylcytosine with phosphorothioate linkage
  modified_base 3: mod_base = OTHER; note = Locked nucleic acid with phosphorothioate linkage
  modified_base 4: mod_base = OTHER; note = Nucleotide with phosphorothioate linkage
  modified_base 5: mod_base = OTHER; note = Nucleotide with phosphorothioate linkage
  modified_base 6: mod_base = OTHER; note = 5-methylcytosine with phosphorothioate linkage
  modified_base 7: mod_base = OTHER; note = Nucleotide with phosphorothioate linkage
  modified_base 8: mod_base = OTHER; note = Nucleotide with phosphorothioate linkage
  modified_base 9: mod_base = OTHER; note = Nucleotide with phosphorothioate linkage
  modified_base 10: mod_base = OTHER; note = 5-methylcytosine with phosphorothioate linkage
  modified_base 11: mod_base = OTHER; note = Nucleotide with phosphorothioate linkage
  modified_base 12: mod_base = OTHER; note = Nucleotide with phosphorothioate linkage
  modified_base 13: mod_base = OTHER; note = 5-methylcytosine with phosphorothioate linkage
  modified_base 14: mod_base = OTHER; note = Nucleotide with phosphorothioate linkage
  modified_base 15: mod_base = OTHER; note = Nucleotide with phosphorothioate linkage
  modified_base 16: mod_base = OTHER; note = Locked nucleic acid with phosphorothioate linkage
  modified_base 17: mod_base = OTHER; note = Locked nucleic acid with phosphorothioate linkage
  modified_base 18: mod_base = OTHER; note = Locked 5-methylcytosine
tcgtgcaggcttcatttc

SEQ ID NO: 396 - DNA, 18 bp, synthetic construct
  source 1..18: mol_type = other DNA
  modified_base 1: mod_base = OTHER; note = Locked 5-methylcytosine with phosphorothioate linkage
  modified_base 2: mod_base = OTHER; note = Locked nucleic acid with phosphorothioate linkage
  modified_base 3: mod_base = OTHER; note = Locked nucleic acid with phosphorothioate linkage
  modified_base 4: mod_base = OTHER; note = Nucleotide with phosphorothioate linkage
  modified_base 5: mod_base = OTHER; note = 5-methylcytosine with phosphorothioate linkage
  modified_base 6: mod_base = OTHER; note = Nucleotide with phosphorothioate linkage
  modified_base 7: mod_base = OTHER; note = Nucleotide with phosphorothioate linkage
  modified_base 8: mod_base = OTHER; note = Nucleotide with phosphorothioate linkage
  modified_base 9: mod_base = OTHER; note = 5-methylcytosine with phosphorothioate linkage
  modified_base 10: mod_base = OTHER; note = Nucleotide with phosphorothioate linkage
  modified_base 11: mod_base = OTHER; note = Nucleotide with phosphorothioate linkage
  modified_base 12: mod_base = OTHER; note = Nucleotide with phosphorothioate linkage
  modified_base 13: mod_base = OTHER; note = 5-methylcytosine with phosphorothioate linkage
  modified_base 14: mod_base = OTHER; note = Nucleotide with phosphorothioate linkage
  modified_base 15: mod_base = OTHER; note = Nucleotide with phosphorothioate linkage
  modified_base 16: mod_base = OTHER; note = Locked 5-methylcytosine with phosphorothioate linkage
  modified_base 17: mod_base = OTHER; note = Locked nucleic acid with phosphorothioate linkage
  modified_base 18: mod_base = OTHER; note = Locked nucleic acid
cattcgtgcaggcttcat

SEQ ID NO: 397 - DNA, 18 bp, synthetic construct
  source 1..18: mol_type = other DNA
  modified_base 1: mod_base = OTHER; note = Locked nucleic acid with phosphorothioate linkage
  modified_base 2: mod_base = OTHER; note = Locked nucleic acid with phosphorothioate linkage
  modified_base 3: mod_base = OTHER; note = Locked nucleic acid with phosphorothioate linkage
  modified_base 4: mod_base = OTHER; note = 5-methylcytosine with phosphorothioate linkage
  modified_base 5: mod_base = OTHER; note = Nucleotide with phosphorothioate linkage
  modified_base 6: mod_base = OTHER; note = Nucleotide with phosphorothioate linkage
  modified_base 7: mod_base = OTHER; note = Nucleotide with phosphorothioate linkage
  modified_base 8: mod_base = OTHER; note = Nucleotide with phosphorothioate linkage
  modified_base 9: mod_base = OTHER; note = Nucleotide with phosphorothioate linkage
  modified_base 10: mod_base = OTHER; note = Nucleotide with phosphorothioate linkage
  modified_base 11: mod_base = OTHER; note = 5-methylcytosine with phosphorothioate linkage
  modified_base 12: mod_base = OTHER; note = Nucleotide with phosphorothioate linkage
  modified_base 13: mod_base = OTHER; note = 5-methylcytosine with phosphorothioate linkage
  modified_base 14: mod_base = OTHER; note = Nucleotide with phosphorothioate linkage
  modified_base 15: mod_base = OTHER; note = Nucleotide with phosphorothioate linkage
  modified_base 16: mod_base = OTHER; note = Locked nucleic acid with phosphorothioate linkage
  modified_base 17: mod_base = OTHER; note = Locked nucleic acid with phosphorothioate linkage
  modified_base 18: mod_base = OTHER; note = Locked 5-methylcytosine
ggacaggaagcacaaaac

SEQ ID NO: 398 - DNA, 18 bp, synthetic construct
  source 1..18: mol_type = other DNA
  modified_base 1: mod_base = OTHER; note = Locked nucleic acid with phosphorothioate linkage
  modified_base 2: mod_base = OTHER; note = Locked nucleic acid with phosphorothioate linkage
  modified_base 3: mod_base = OTHER; note = Locked nucleic acid with phosphorothioate linkage
  modified_base 4: mod_base = OTHER; note = Nucleotide with phosphorothioate linkage
  modified_base 5: mod_base = OTHER; note = Nucleotide with phosphorothioate linkage
  modified_base 6: mod_base = OTHER; note = Nucleotide with phosphorothioate linkage
  modified_base 7: mod_base = OTHER; note = Nucleotide with phosphorothioate linkage
  modified_base 8: mod_base = OTHER; note = 5-methylcytosine with phosphorothioate linkage
  modified_base 9: mod_base = OTHER; note = Nucleotide with phosphorothioate linkage
  modified_base 10: mod_base = OTHER; note = Nucleotide with phosphorothioate linkage
  modified_base 11: mod_base = OTHER; note = Nucleotide with phosphorothioate linkage
  modified_base 12: mod_base = OTHER; note = Nucleotide with phosphorothioate linkage
  modified_base 13: mod_base = OTHER; note = Nucleotide with phosphorothioate linkage
  modified_base 14: mod_base = OTHER; note = Nucleotide with phosphorothioate linkage
  modified_base 15: mod_base = OTHER; note = 5-methylcytosine with phosphorothioate linkage
  modified_base 16: mod_base = OTHER; note = Locked nucleic acid with phosphorothioate linkage
  modified_base 17: mod_base = OTHER; note = Locked 5-methylcytosine with phosphorothioate linkage
  modified_base 18: mod_base = OTHER; note = Locked nucleic acid
agttggacaggaagcaca

SEQ ID NO: 399 - DNA, 18 bp, synthetic construct
  source 1..18: mol_type = other DNA
  modified_base 1: mod_base = OTHER; note = Locked nucleic acid with phosphorothioate linkage
  modified_base 2: mod_base = OTHER; note = Locked nucleic acid with phosphorothioate linkage
  modified_base 3: mod_base = OTHER; note = Locked nucleic acid with phosphorothioate linkage
  modified_base 4: mod_base = OTHER; note = Nucleotide with phosphorothioate linkage
  modified_base 5: mod_base = OTHER; note = Nucleotide with phosphorothioate linkage
  modified_base 6: mod_base = OTHER; note = Nucleotide with phosphorothioate linkage
  modified_base 7: mod_base = OTHER; note = Nucleotide with phosphorothioate linkage
  modified_base 8: mod_base = OTHER; note = Nucleotide with phosphorothioate linkage
  modified_base 9: mod_base = OTHER; note = 5-methylcytosine with phosphorothioate linkage
  modified_base 10: mod_base = OTHER; note = Nucleotide with phosphorothioate linkage
  modified_base 11: mod_base = OTHER; note = Nucleotide with phosphorothioate linkage
  modified_base 12: mod_base = OTHER; note = Nucleotide with phosphorothioate linkage
  modified_base 13: mod_base = OTHER; note = Nucleotide with phosphorothioate linkage
  modified_base 14: mod_base = OTHER; note = Nucleotide with phosphorothioate linkage
  modified_base 15: mod_base = OTHER; note = Nucleotide with phosphorothioate linkage
  modified_base 16: mod_base = OTHER; note = Locked 5-methylcytosine with phosphorothioate linkage
  modified_base 17: mod_base = OTHER; note = Locked nucleic acid with phosphorothioate linkage
  modified_base 18: mod_base = OTHER; note = Locked 5-methylcytosine
aagttggacaggaagcac

SEQ ID NO: 400 - DNA, 18 bp, synthetic construct
  source 1..18: mol_type = other DNA
  modified_base 1: mod_base = OTHER; note = Locked 5-methylcytosine with phosphorothioate linkage
  modified_base 2: mod_base = OTHER; note = Locked nucleic acid with phosphorothioate linkage
  modified_base 3: mod_base = OTHER; note = Locked nucleic acid with phosphorothioate linkage
  modified_base 4: mod_base = OTHER; note = Nucleotide with phosphorothioate linkage
  modified_base 5: mod_base = OTHER; note = Nucleotide with phosphorothioate linkage
  modified_base 6: mod_base = OTHER; note = 5-methylcytosine with phosphorothioate linkage
  modified_base 7: mod_base = OTHER; note = Nucleotide with phosphorothioate linkage
  modified_base 8: mod_base = OTHER; note = Nucleotide with phosphorothioate linkage
  modified_base 9: mod_base = OTHER; note = Nucleotide with phosphorothioate linkage
  modified_base 10: mod_base = OTHER; note = 5-methylcytosine with phosphorothioate linkage
  modified_base 11: mod_base = OTHER; note = Nucleotide with phosphorothioate linkage
  modified_base 12: mod_base = OTHER; note = 5-methylcytosine with phosphorothioate linkage
  modified_base 13: mod_base = OTHER; note = 5-methylcytosine with phosphorothioate linkage
  modified_base 14: mod_base = OTHER; note = Nucleotide with phosphorothioate linkage
  modified_base 15: mod_base = OTHER; note = Nucleotide with phosphorothioate linkage
  modified_base 16: mod_base = OTHER; note = Locked nucleic acid with phosphorothioate linkage
  modified_base 17: mod_base = OTHER; note = Locked 5-methylcytosine with phosphorothioate linkage
  modified_base 18: mod_base = OTHER; note = Locked nucleic acid
ctgagcttgctcctttct

SEQ ID NO: 401 - DNA, 18 bp, synthetic construct
  source 1..18: mol_type = other DNA
  modified_base 1: mod_base = OTHER; note = Locked nucleic acid with phosphorothioate linkage
  modified_base 2: mod_base = OTHER; note = Locked 5-methylcytosine with phosphorothioate linkage
  modified_base 3: mod_base = OTHER; note = Locked nucleic acid with phosphorothioate linkage
  modified_base 4: mod_base = OTHER; note = Nucleotide with phosphorothioate linkage
  modified_base 5: mod_base = OTHER; note = Nucleotide with phosphorothioate linkage
  modified_base 6: mod_base = OTHER; note = Nucleotide with phosphorothioate linkage
  modified_base 7: mod_base = OTHER; note = 5-methylcytosine with phosphorothioate linkage
  modified_base 8: mod_base = OTHER; note = Nucleotide with phosphorothioate linkage
  modified_base 9: mod_base = OTHER; note = Nucleotide with phosphorothioate linkage
  modified_base 10: mod_base = OTHER; note = Nucleotide with phosphorothioate linkage
  modified_base 11: mod_base = OTHER; note = 5-methylcytosine with phosphorothioate linkage
  modified_base 12: mod_base = OTHER; note = Nucleotide with phosphorothioate linkage
  modified_base 13: mod_base = OTHER; note = 5-methylcytosine with phosphorothioate linkage
  modified_base 14: mod_base = OTHER; note = 5-methylcytosine with phosphorothioate linkage
  modified_base 15: mod_base = OTHER; note = Nucleotide with phosphorothioate linkage
  modified_base 16: mod_base = OTHER; note = Locked nucleic acid with phosphorothioate linkage
  modified_base 17: mod_base = OTHER; note = Locked nucleic acid with phosphorothioate linkage
  modified_base 18: mod_base = OTHER; note = Locked 5-methylcytosine
gctgagcttgctcctttc

SEQ ID NO: 402 - DNA, 18 bp, synthetic construct
  source 1..18: mol_type = other DNA
  modified_base 1: mod_base = OTHER; note = Locked nucleic acid with phosphorothioate linkage
  modified_base 2: mod_base = OTHER; note = Locked nucleic acid with phosphorothioate linkage
  modified_base 3: mod_base = OTHER; note = Locked 5-methylcytosine with phosphorothioate linkage
  modified_base 4: mod_base = OTHER; note = Nucleotide with phosphorothioate linkage
  modified_base 5: mod_base = OTHER; note = Nucleotide with phosphorothioate linkage
  modified_base 6: mod_base = OTHER; note = Nucleotide with phosphorothioate linkage
  modified_base 7: mod_base = OTHER; note = Nucleotide with phosphorothioate linkage
  modified_base 8: mod_base = OTHER; note = 5-methylcytosine with phosphorothioate linkage
  modified_base 9: mod_base = OTHER; note = Nucleotide with phosphorothioate linkage
  modified_base 10: mod_base = OTHER; note = Nucleotide with phosphorothioate linkage
  modified_base 11: mod_base = OTHER; note = Nucleotide with phosphorothioate linkage
  modified_base 12: mod_base = OTHER; note = 5-methylcytosine with phosphorothioate linkage
  modified_base 13: mod_base = OTHER; note = Nucleotide with phosphorothioate linkage
  modified_base 14: mod_base = OTHER; note = 5-methylcytosine with phosphorothioate linkage
  modified_base 15: mod_base = OTHER; note = 5-methylcytosine with phosphorothioate linkage
  modified_base 16: mod_base = OTHER; note = Locked nucleic acid with phosphorothioate linkage
  modified_base 17: mod_base = OTHER; note = Locked nucleic acid with phosphorothioate linkage
  modified_base 18: mod_base = OTHER; note = Locked nucleic acid
agctgagcttgctccttt

SEQ ID NO: 403 - DNA, 18 bp, synthetic construct
  source 1..18: mol_type = other DNA
  modified_base 1: mod_base = OTHER; note = Locked nucleic acid with phosphorothioate linkage
  modified_base 2: mod_base = OTHER; note = Locked nucleic acid with phosphorothioate linkage
  modified_base 3: mod_base = OTHER; note = Locked nucleic acid with phosphorothioate linkage
  modified_base 4: mod_base = OTHER; note = Nucleotide with phosphorothioate linkage
  modified_base 5: mod_base = OTHER; note = 5-methylcytosine with phosphorothioate linkage
  modified_base 6: mod_base = OTHER; note = Nucleotide with phosphorothioate linkage
  modified_base 7: mod_base = OTHER; note = Nucleotide with phosphorothioate linkage
  modified_base 8: mod_base = OTHER; note = Nucleotide with phosphorothioate linkage
  modified_base 9: mod_base = OTHER; note = Nucleotide with phosphorothioate linkage
  modified_base 10: mod_base = OTHER; note = 5-methylcytosine with phosphorothioate linkage
  modified_base 11: mod_base = OTHER; note = Nucleotide with phosphorothioate linkage
  modified_base 12: mod_base = OTHER; note = Nucleotide with phosphorothioate linkage
  modified_base 13: mod_base = OTHER; note = Nucleotide with phosphorothioate linkage
  modified_base 14: mod_base = OTHER; note = 5-methylcytosine with phosphorothioate linkage
  modified_base 15: mod_base = OTHER; note = Nucleotide with phosphorothioate linkage
  modified_base 16: mod_base = OTHER; note = Locked 5-methylcytosine with phosphorothioate linkage
  modified_base 17: mod_base = OTHER; note = Locked 5-methylcytosine with phosphorothioate linkage
  modified_base 18: mod_base = OTHER; note = Locked nucleic acid
taagctgagcttgctcct

SEQ ID NO: 404 - DNA, 18 bp, synthetic construct
  source 1..18: mol_type = other DNA
  modified_base 1: mod_base = OTHER; note = Locked nucleic acid with phosphorothioate linkage
  modified_base 2: mod_base = OTHER; note = Locked nucleic acid with phosphorothioate linkage
  modified_base 3: mod_base = OTHER; note = Locked nucleic acid with phosphorothioate linkage
  modified_base 4: mod_base = OTHER; note = Nucleotide with phosphorothioate linkage
  modified_base 5: mod_base = OTHER; note = Nucleotide with phosphorothioate linkage
  modified_base 6: mod_base = OTHER; note = Nucleotide with phosphorothioate linkage
  modified_base 7: mod_base = OTHER; note = 5-methylcytosine with phosphorothioate linkage
  modified_base 8: mod_base = OTHER; note = Nucleotide with phosphorothioate linkage
  modified_base 9: mod_base = OTHER; note = Nucleotide with phosphorothioate linkage
  modified_base 10: mod_base = OTHER; note = Nucleotide with phosphorothioate linkage
  modified_base 11: mod_base = OTHER; note = Nucleotide with phosphorothioate linkage
  modified_base 12: mod_base = OTHER; note = 5-methylcytosine with phosphorothioate linkage
  modified_base 13: mod_base = OTHER; note = Nucleotide with phosphorothioate linkage
  modified_base 14: mod_base = OTHER; note = Nucleotide with phosphorothioate linkage
  modified_base 15: mod_base = OTHER; note = Nucleotide with phosphorothioate linkage
  modified_base 16: mod_base = OTHER; note = Locked 5-methylcytosine with phosphorothioate linkage
  modified_base 17: mod_base = OTHER; note = Locked nucleic acid with phosphorothioate linkage
  modified_base 18: mod_base = OTHER; note = Locked 5-methylcytosine
ggtaagctgagcttgctc

SEQ ID NO: 405 - DNA, 18 bp, synthetic construct
  source 1..18: mol_type = other DNA
  modified_base 1: mod_base = OTHER; note = Locked nucleic acid with phosphorothioate linkage
  modified_base 2: mod_base = OTHER; note = Locked nucleic acid with phosphorothioate linkage
  modified_base 3: mod_base = OTHER; note = Locked nucleic acid with phosphorothioate linkage
  modified_base 4: mod_base = OTHER; note = Nucleotide with phosphorothioate linkage
  modified_base 5: mod_base = OTHER; note = Nucleotide with phosphorothioate linkage
  modified_base 6: mod_base = OTHER; note = Nucleotide with phosphorothioate linkage
  modified_base 7: mod_base = OTHER; note = Nucleotide with phosphorothioate linkage
  modified_base 8: mod_base = OTHER; note = 5-methylcytosine with phosphorothioate linkage
  modified_base 9: mod_base = OTHER; note = Nucleotide with phosphorothioate linkage
  modified_base 10: mod_base = OTHER; note = Nucleotide with phosphorothioate linkage
  modified_base 11: mod_base = OTHER; note = Nucleotide with phosphorothioate linkage
  modified_base 12: mod_base = OTHER; note = Nucleotide with phosphorothioate linkage
  modified_base 13: mod_base = OTHER; note = 5-methylcytosine with phosphorothioate linkage
  modified_base 14: mod_base = OTHER; note = Nucleotide with phosphorothioate linkage
  modified_base 15: mod_base = OTHER; note = Nucleotide with phosphorothioate linkage
  modified_base 16: mod_base = OTHER; note = Locked nucleic acid with phosphorothioate linkage
  modified_base 17: mod_base = OTHER; note = Locked 5-methylcytosine with phosphorothioate linkage
  modified_base 18: mod_base = OTHER; note = Locked nucleic acid
aggtaagctgagcttgct

SEQ ID NO: 406 - DNA, 18 bp, synthetic construct
  source 1..18: mol_type = other DNA
  modified_base 1: mod_base = OTHER; note = Locked 5-methylcytosine with phosphorothioate linkage
  modified_base 2: mod_base = OTHER; note = Locked 5-methylcytosine with phosphorothioate linkage
  modified_base 3: mod_base = OTHER; note = Locked 5-methylcytosine with phosphorothioate linkage
  modified_base 4: mod_base = OTHER; note = 5-methylcytosine with phosphorothioate linkage
  modified_base 5: mod_base = OTHER; note = 5-methylcytosine with phosphorothioate linkage
  modified_base 6: mod_base = OTHER; note = Nucleotide with phosphorothioate linkage
  modified_base 7: mod_base = OTHER; note = 5-methylcytosine with phosphorothioate linkage
  modified_base 8: mod_base = OTHER; note = Nucleotide with phosphorothioate linkage
  modified_base 9: mod_base = OTHER; note = Nucleotide with phosphorothioate linkage
  modified_base 10: mod_base = OTHER; note = 5-methylcytosine with phosphorothioate linkage
  modified_base 11: mod_base = OTHER; note = Nucleotide with phosphorothioate linkage
  modified_base 12: mod_base = OTHER; note = Nucleotide with phosphorothioate linkage
  modified_base 13: mod_base = OTHER; note = Nucleotide with phosphorothioate linkage
  modified_base 14: mod_base = OTHER; note = 5-methylcytosine with phosphorothioate linkage
  modified_base 15: mod_base = OTHER; note = Nucleotide with phosphorothioate linkage
  modified_base 16: mod_base = OTHER; note = Locked nucleic acid with phosphorothioate linkage
  modified_base 17: mod_base = OTHER; note = Locked 5-methylcytosine with phosphorothioate linkage
  modified_base 18: mod_base = OTHER; note = Locked nucleic acid
cccccgcagctggctgca

SEQ ID NO: 407 - DNA, 18 bp, synthetic construct
  source 1..18: mol_type = other DNA
  modified_base 1: mod_base = OTHER; note = Locked nucleic acid with phosphorothioate linkage
  modified_base 2: mod_base = OTHER; note = Locked 5-methylcytosine with phosphorothioate linkage
  modified_base 3: mod_base = OTHER; note = Locked 5-methylcytosine with phosphorothioate linkage
  modified_base 4: mod_base = OTHER; note = 5-methylcytosine with phosphorothioate linkage
  modified_base 5: mod_base = OTHER; note = 5-methylcytosine with phosphorothioate linkage
  modified_base 6: mod_base = OTHER; note = 5-methylcytosine with phosphorothioate linkage
  modified_base 7: mod_base = OTHER; note = Nucleotide with phosphorothioate linkage
  modified_base 8: mod_base = OTHER; note = 5-methylcytosine with phosphorothioate linkage
  modified_base 9: mod_base = OTHER; note = Nucleotide with phosphorothioate linkage
  modified_base 10: mod_base = OTHER; note = Nucleotide with phosphorothioate linkage
  modified_base 11: mod_base = OTHER; note = 5-methylcytosine with phosphorothioate linkage
  modified_base 12: mod_base = OTHER; note = Nucleotide with phosphorothioate linkage
  modified_base 13: mod_base = OTHER; note = Nucleotide with phosphorothioate linkage
  modified_base 14: mod_base = OTHER; note = Nucleotide with phosphorothioate linkage
  modified_base 15: mod_base = OTHER; note = 5-methylcytosine with phosphorothioate linkage
  modified_base 16: mod_base = OTHER; note = Locked nucleic acid with phosphorothioate linkage
  modified_base 17: mod_base = OTHER; note = Locked nucleic acid with phosphorothioate linkage
  modified_base 18: mod_base = OTHER; note = Locked 5-methylcytosine
tcccccgcagctggctgc

SEQ ID NO: 408 - DNA, 20 bp, synthetic construct
  source 1..20: mol_type = other DNA
  modified_base 1: mod_base = OTHER; note = 2'-O-methoxyethyl modified nucleotide with phosphorothioate linkage
  modified_base 2: mod_base = OTHER; note = 2'-O-methoxyethyl modified thymine
  modified_base 3: mod_base = OTHER; note = 2'-O-methoxyethyl modified thymine
  modified_base 4: mod_base = OTHER; note = 2'-O-methoxyethyl modified 5-methylcytosine with phosphorothioate linkage
  modified_base 5: mod_base = OTHER; note = Nucleotide with phosphorothioate linkage
  modified_base 6: mod_base = OTHER; note = 5-methylcytosine with phosphorothioate linkage
  modified_base 7: mod_base = OTHER; note = Nucleotide with phosphorothioate linkage
  modified_base 8: mod_base = OTHER; note = Nucleotide with phosphorothioate linkage
  modified_base 9: mod_base = OTHER; note = Nucleotide with phosphorothioate linkage
  modified_base 10: mod_base = OTHER; note = 5-methylcytosine with phosphorothioate linkage
  modified_base 11: mod_base = OTHER; note = Nucleotide with phosphorothioate linkage
  modified_base 12: mod_base = OTHER; note = 5-methylcytosine with phosphorothioate linkage
  modified_base 13: mod_base = OTHER; note = Nucleotide with phosphorothioate linkage
  modified_base 14: mod_base = OTHER; note = Nucleotide with phosphorothioate linkage
  modified_base 15: mod_base = OTHER; note = 5-methylcytosine with phosphorothioate linkage
  modified_base 16: mod_base = OTHER; note = 2'-O-methoxyethyl modified 5-methylcytosine
  modified_base 17: mod_base = OTHER; note = 2'-O-methoxyethyl modified nucleotide
  modified_base 18: mod_base = OTHER; note = 2'-O-methoxyethyl modified 5-methylcytosine
  modified_base 19: mod_base = OTHER; note = 2'-O-methoxyethyl modified 5-methylcytosine with phosphorothioate linkage
  modified_base 20: mod_base = OTHER; note = 2'-O-methoxyethyl modified nucleotide
  misc_feature 1..4: note = RNA
  misc_feature 5..15: note = DNA
  misc_feature 16..20: note = RNA
gttctctttcgctgccgcca

SEQ ID NO: 409 - DNA, 20 bp, synthetic construct
  source 1..20: mol_type = other DNA
  modified_base 1: mod_base = OTHER; note = 2'-O-methoxyethyl modified thymine with phosphorothioate linkage
  modified_base 2: mod_base = OTHER; note = 2'-O-methoxyethyl modified 5-methylcytosine
  modified_base 3: mod_base = OTHER; note = 2'-O-methoxyethyl modified nucleotide
  modified_base 4: mod_base = OTHER; note = 2'-O-methoxyethyl modified thymine with phosphorothioate linkage
  modified_base 5: mod_base = OTHER; note = Nucleotide with phosphorothioate linkage
  modified_base 6: mod_base = OTHER; note = 5-methylcytosine with phosphorothioate linkage
  modified_base 7: mod_base = OTHER; note = Nucleotide with phosphorothioate linkage
  modified_base 8: mod_base = OTHER; note = 5-methylcytosine with phosphorothioate linkage
  modified_base 9: mod_base = OTHER; note = Nucleotide with phosphorothioate linkage
  modified_base 10: mod_base = OTHER; note = Nucleotide with phosphorothioate linkage
  modified_base 11: mod_base = OTHER; note = Nucleotide with phosphorothioate linkage
  modified_base 12: mod_base = OTHER; note = 5-methylcytosine with phosphorothioate linkage
  modified_base 13: mod_base = OTHER; note = Nucleotide with phosphorothioate linkage
  modified_base 14: mod_base = OTHER; note = 5-methylcytosine with phosphorothioate linkage
  modified_base 15: mod_base = OTHER; note = Nucleotide with phosphorothioate linkage
  modified_base 16: mod_base = OTHER; note = 2'-O-methoxyethyl modified nucleotide
  modified_base 17: mod_base = OTHER; note = 2'-O-methoxyethyl modified 5-methylcytosine
  modified_base 18: mod_base = OTHER; note = 2'-O-methoxyethyl modified 5-methylcytosine
  modified_base 19: mod_base = OTHER; note = 2'-O-methoxyethyl modified nucleotide with phosphorothioate linkage
  modified_base 20: mod_base = OTHER; note = 2'-O-methoxyethyl modified 5-methylcytosine
  misc_feature 1..4: note = RNA
  misc_feature 5..15: note = DNA
  misc_feature 16..20: note = RNA
tcgttctctttcgctgccgc

SEQ ID NO: 410 - DNA, 20 bp, synthetic construct
  source 1..20: mol_type = other DNA
  modified_base 1: mod_base = OTHER; note = 2'-O-methoxyethyl modified 5-methylcytosine with phosphorothioate linkage
  modified_base 2: mod_base = OTHER; note = 2'-O-methoxyethyl modified thymine
  modified_base 3: mod_base = OTHER; note = 2'-O-methoxyethyl modified 5-methylcytosine
  modified_base 4: mod_base = OTHER; note = 2'-O-methoxyethyl modified nucleotide with phosphorothioate linkage
  modified_base 5: mod_base = OTHER; note = Nucleotide with phosphorothioate linkage
  modified_base 6: mod_base = OTHER; note = Nucleotide with phosphorothioate linkage
  modified_base 7: mod_base = OTHER; note = 5-methylcytosine with phosphorothioate linkage
  modified_base 8: mod_base = OTHER; note = Nucleotide with phosphorothioate linkage
  modified_base 9: mod_base = OTHER; note = 5-methylcytosine with phosphorothioate linkage
  modified_base 10: mod_base = OTHER; note = Nucleotide with phosphorothioate linkage
  modified_base 11: mod_base = OTHER; note = Nucleotide with phosphorothioate linkage
  modified_base 12: mod_base = OTHER; note = Nucleotide with phosphorothioate linkage
  modified_base 13: mod_base = OTHER; note = 5-methylcytosine with phosphorothioate linkage
  modified_base 14: mod_base = OTHER; note = Nucleotide with phosphorothioate linkage
  modified_base 15: mod_base = OTHER; note = 5-methylcytosine with phosphorothioate linkage
  modified_base 16: mod_base = OTHER; note = 2'-O-methoxyethyl modified thymine
  modified_base 17: mod_base = OTHER; note = 2'-O-methoxyethyl modified nucleotide
  modified_base 18: mod_base = OTHER; note = 2'-O-methoxyethyl modified 5-methylcytosine
  modified_base 19: mod_base = OTHER; note = 2'-O-methoxyethyl modified 5-methylcytosine with phosphorothioate linkage
  modified_base 20: mod_base = OTHER; note = 2'-O-methoxyethyl modified nucleotide
  misc_feature 1..4: note = RNA
  misc_feature 5..15: note = DNA
  misc_feature 16..20: note = RNA
ctcgttctctttcgctgccg

SEQ ID NO: 411 - DNA, 20 bp, synthetic construct
  source 1..20: mol_type = other DNA
  modified_base 1: mod_base = OTHER; note = 2'-O-methoxyethyl modified nucleotide with phosphorothioate linkage
  modified_base 2: mod_base = OTHER; note = 2'-O-methoxyethyl modified 5-methylcytosine
  modified_base 3: mod_base = OTHER; note = 2'-O-methoxyethyl modified 5-methylcytosine
  modified_base 4: mod_base = OTHER; note = 2'-O-methoxyethyl modified thymine with phosphorothioate linkage
  modified_base 5: mod_base = OTHER; note = 5-methylcytosine with phosphorothioate linkage
  modified_base 6: mod_base = OTHER; note = Nucleotide with phosphorothioate linkage
  modified_base 7: mod_base = OTHER; note = Nucleotide with phosphorothioate linkage
  modified_base 8: mod_base = OTHER; note = Nucleotide with phosphorothioate linkage
  modified_base 9: mod_base = OTHER; note = 5-methylcytosine with phosphorothioate linkage
  modified_base 10: mod_base = OTHER; note = Nucleotide with phosphorothioate linkage
  modified_base 11: mod_base = OTHER; note = 5-methylcytosine with phosphorothioate linkage
  modified_base 12: mod_base = OTHER; note = Nucleotide with phosphorothioate linkage
  modified_base 13: mod_base = OTHER; note = Nucleotide with phosphorothioate linkage
  modified_base 14: mod_base = OTHER; note = Nucleotide with phosphorothioate linkage
  modified_base 15: mod_base = OTHER; note = 5-methylcytosine with phosphorothioate linkage
  modified_base 16: mod_base = OTHER; note = 2'-O-methoxyethyl modified nucleotide
  modified_base 17: mod_base = OTHER; note = 2'-O-methoxyethyl modified 5-methylcytosine
  modified_base 18: mod_base = OTHER; note = 2'-O-methoxyethyl modified thymine
  modified_base 19: mod_base = OTHER; note = 2'-O-methoxyethyl modified nucleotide with phosphorothioate linkage
  modified_base 20: mod_base = OTHER; note = 2'-O-methoxyethyl modified 5-methylcytosine
  misc_feature 1..4: note = RNA
  misc_feature 5..15: note = DNA
  misc_feature 16..20: note = RNA
gcctcgttctctttcgctgc

SEQ ID NO: 412 - DNA, 20 bp, synthetic construct
  source 1..20: mol_type = other DNA
  modified_base 1: mod_base = OTHER; note = 2'-O-methoxyethyl modified 5-methylcytosine with phosphorothioate linkage
  modified_base 2: mod_base = OTHER; note = 2'-O-methoxyethyl modified nucleotide
  modified_base 3: mod_base = OTHER; note = 2'-O-methoxyethyl modified 5-methylcytosine
  modified_base 4: mod_base = OTHER; note = 2'-O-methoxyethyl modified 5-methylcytosine with phosphorothioate linkage
  modified_base 5: mod_base = OTHER; note = Nucleotide with phosphorothioate linkage
  modified_base 6: mod_base = OTHER; note = 5-methylcytosine with phosphorothioate linkage
  modified_base 7: mod_base = OTHER; note = Nucleotide with phosphorothioate linkage
  modified_base 8: mod_base = OTHER; note = Nucleotide with phosphorothioate linkage
  modified_base 9: mod_base = OTHER; note = Nucleotide with phosphorothioate linkage
  modified_base 10: mod_base = OTHER; note = 5-methylcytosine with phosphorothioate linkage
  modified_base 11: mod_base = OTHER; note = Nucleotide with phosphorothioate linkage
  modified_base 12: mod_base = OTHER; note = 5-methylcytosine with phosphorothioate linkage
  modified_base 13: mod_base = OTHER; note = Nucleotide with phosphorothioate linkage
  modified_base 14: mod_base = OTHER; note = Nucleotide with phosphorothioate linkage
  modified_base 15: mod_base = OTHER; note = Nucleotide with phosphorothioate linkage
  modified_base 16: mod_base = OTHER; note = 2'-O-methoxyethyl modified 5-methylcytosine
  modified_base 17: mod_base = OTHER; note = 2'-O-methoxyethyl modified nucleotide
  modified_base 18: mod_base = OTHER; note = 2'-O-methoxyethyl modified 5-methylcytosine
  modified_base 19: mod_base = OTHER; note = 2'-O-methoxyethyl modified thymine with phosphorothioate linkage
  modified_base 20: mod_base = OTHER; note = 2'-O-methoxyethyl modified nucleotide
  misc_feature 1..4: note = RNA
  misc_feature 5..15: note = DNA
  misc_feature 16..20: note = RNA
cgcctcgttctctttcgctg

SEQ ID NO: 413 - DNA, 20 bp, synthetic construct
  source 1..20: mol_type = other DNA
  modified_base 1: mod_base = OTHER; note = 2'-O-methoxyethyl modified nucleotide with phosphorothioate linkage
  modified_base 2: mod_base = OTHER; note = 2'-O-methoxyethyl modified 5-methylcytosine
  modified_base 3: mod_base = OTHER; note = 2'-O-methoxyethyl modified 5-methylcytosine
  modified_base 4: mod_base = OTHER; note = 2'-O-methoxyethyl modified nucleotide with phosphorothioate linkage
  modified_base 5: mod_base = OTHER; note = 5-methylcytosine with phosphorothioate linkage
  modified_base 6: mod_base = OTHER; note = 5-methylcytosine with phosphorothioate linkage
  modified_base 7: mod_base = OTHER; note = Nucleotide with phosphorothioate linkage
  modified_base 8: mod_base = OTHER; note = 5-methylcytosine with phosphorothioate linkage
  modified_base 9: mod_base = OTHER; note = Nucleotide with phosphorothioate linkage
  modified_base 10: mod_base = OTHER; note = Nucleotide with phosphorothioate linkage
  modified_base 11: mod_base = OTHER; note = Nucleotide with phosphorothioate linkage
  modified_base 12: mod_base = OTHER; note = 5-methylcytosine with phosphorothioate linkage
  modified_base 13: mod_base = OTHER; note = Nucleotide with phosphorothioate linkage
  modified_base 14: mod_base = OTHER; note = 5-methylcytosine with phosphorothioate linkage
  modified_base 15: mod_base = OTHER; note = Nucleotide with phosphorothioate linkage
  modified_base 16: mod_base = OTHER; note = 2'-O-methoxyethyl modified thymine
  modified_base 17: mod_base = OTHER; note = 2'-O-methoxyethyl modified thymine
  modified_base 18: mod_base = OTHER; note = 2'-O-methoxyethyl modified 5-methylcytosine
  modified_base 19: mod_base = OTHER; note = 2'-O-methoxyethyl modified nucleotide with phosphorothioate linkage
  modified_base 20: mod_base = OTHER; note = 2'-O-methoxyethyl modified 5-methylcytosine
  misc_feature 1..4: note = RNA
  misc_feature 5..15: note = DNA
  misc_feature 16..20: note = RNA
accgcctcgttctctttcgc

SEQ ID NO: 414 - DNA, 20 bp, synthetic construct
  source 1..20: mol_type = other DNA
  modified_base 1: mod_base = OTHER; note = 2'-O-methoxyethyl modified 5-methylcytosine with phosphorothioate linkage
  modified_base 2: mod_base = OTHER; note = 2'-O-methoxyethyl modified nucleotide
  modified_base 3: mod_base = OTHER; note = 2'-O-methoxyethyl modified 5-methylcytosine
  modified_base 4: mod_base = OTHER; note = 2'-O-methoxyethyl modified 5-methylcytosine with phosphorothioate linkage
  modified_base 5: mod_base = OTHER; note = Nucleotide with phosphorothioate linkage
  modified_base 6: mod_base = OTHER; note = 5-methylcytosine with phosphorothioate linkage
  modified_base 7: mod_base = OTHER; note = 5-methylcytosine with phosphorothioate linkage
  modified_base 8: mod_base = OTHER; note = Nucleotide with phosphorothioate linkage
  modified_base 9: mod_base = OTHER; note = 5-methylcytosine with phosphorothioate linkage
  modified_base 10: mod_base = OTHER; note = Nucleotide with phosphorothioate linkage
  modified_base 11: mod_base = OTHER; note = Nucleotide with phosphorothioate linkage
  modified_base 12: mod_base = OTHER; note = Nucleotide with phosphorothioate linkage
  modified_base 13: mod_base = OTHER; note = 5-methylcytosine with phosphorothioate linkage
  modified_base 14: mod_base = OTHER; note = Nucleotide with phosphorothioate linkage
  modified_base 15: mod_base = OTHER; note = 5-methylcytosine with phosphorothioate linkage
  modified_base 16: mod_base = OTHER; note = 2'-O-methoxyethyl modified thymine
  modified_base 17: mod_base = OTHER; note = 2'-O-methoxyethyl modified thymine
  modified_base 18: mod_base = OTHER; note = 2'-O-methoxyethyl modified thymine
  modified_base 19: mod_base = OTHER; note = 2'-O-methoxyethyl modified 5-methylcytosine with phosphorothioate linkage
  modified_base 20: mod_base = OTHER; note = 2'-O-methoxyethyl modified nucleotide
  misc_feature 1..4: note = RNA
  misc_feature 5..15: note = DNA
  misc_feature 16..20: note = RNA
caccgcctcgttctctttcg

SEQ ID NO: 415 - DNA, 20 bp, synthetic construct
  source 1..20: mol_type = other DNA
  modified_base 1: mod_base = OTHER; note = 2'-O-methoxyethyl modified 5-methylcytosine with phosphorothioate linkage
  modified_base 2: mod_base = OTHER; note = 2'-O-methoxyethyl modified 5-methylcytosine
  modified_base 3: mod_base = OTHER; note = 2'-O-methoxyethyl modified nucleotide
  modified_base 4: mod_base = OTHER; note = 2'-O-methoxyethyl modified 5-methylcytosine with phosphorothioate linkage
  modified_base 5: mod_base = OTHER; note = 5-methylcytosine with phosphorothioate linkage
  modified_base 6: mod_base = OTHER; note = Nucleotide with phosphorothioate linkage
  modified_base 7: mod_base = OTHER; note = 5-methylcytosine with phosphorothioate linkage
  modified_base 8: mod_base = OTHER; note = 5-methylcytosine with phosphorothioate linkage
  modified_base 9: mod_base = OTHER; note = Nucleotide with phosphorothioate linkage
  modified_base 10: mod_base = OTHER; note = 5-methylcytosine with phosphorothioate linkage
  modified_base 11: mod_base = OTHER; note = Nucleotide with phosphorothioate linkage
  modified_base 12: mod_base = OTHER; note = Nucleotide with phosphorothioate linkage
  modified_base 13: mod_base = OTHER; note = Nucleotide with phosphorothioate linkage
  modified_base 14: mod_base = OTHER; note = 5-methylcytosine with phosphorothioate linkage
  modified_base 15: mod_base = OTHER; note = Nucleotide with phosphorothioate linkage
  modified_base 16: mod_base = OTHER; note = 2'-O-methoxyethyl modified 5-methylcytosine
  modified_base 17: mod_base = OTHER; note = 2'-O-methoxyethyl modified thymine
  modified_base 18: mod_base = OTHER; note = 2'-O-methoxyethyl modified thymine
  modified_base 19: mod_base = OTHER; note = 2'-O-methoxyethyl modified thymine with phosphorothioate linkage
  modified_base 20: mod_base = OTHER; note = 2'-O-methoxyethyl modified 5-methylcytosine
  misc_feature 1..4: note = RNA
  misc_feature 5..15: note = DNA
  misc_feature 16..20: note = RNA
ccaccgcctcgttctctttc

SEQ ID NO: 416 - DNA, 20 bp, synthetic construct
  source 1..20: mol_type = other DNA
  modified_base 1: mod_base = OTHER; note = 2'-O-methoxyethyl modified nucleotide with phosphorothioate linkage
  modified_base 2: mod_base = OTHER; note = 2'-O-methoxyethyl modified 5-methylcytosine
  modified_base 3: mod_base = OTHER; note = 2'-O-methoxyethyl modified 5-methylcytosine
  modified_base 4: mod_base = OTHER; note = 2'-O-methoxyethyl modified nucleotide with phosphorothioate linkage
  modified_base 5: mod_base = OTHER; note = 5-methylcytosine with phosphorothioate linkage
  modified_base 6: mod_base = OTHER; note = 5-methylcytosine with phosphorothioate linkage
  modified_base 7: mod_base = OTHER; note = Nucleotide with phosphorothioate linkage
  modified_base 8: mod_base = OTHER; note = 5-methylcytosine with phosphorothioate linkage
  modified_base 9: mod_base = OTHER; note = 5-methylcytosine with phosphorothioate linkage
  modified_base 10: mod_base = OTHER; note = Nucleotide with phosphorothioate linkage
  modified_base 11: mod_base = OTHER; note = 5-methylcytosine with phosphorothioate linkage
  modified_base 12: mod_base = OTHER; note = Nucleotide with phosphorothioate linkage
  modified_base 13: mod_base = OTHER; note = Nucleotide with phosphorothioate linkage
  modified_base 14: mod_base = OTHER; note = Nucleotide with phosphorothioate linkage
  modified_base 15: mod_base = OTHER; note = 5-methylcytosine with phosphorothioate linkage
  modified_base 16: mod_base = OTHER; note = 2'-O-methoxyethyl modified thymine
  modified_base 17: mod_base = OTHER; note = 2'-O-methoxyethyl modified 5-methylcytosine
  modified_base 18: mod_base = OTHER; note = 2'-O-methoxyethyl modified thymine
  modified_base 19: mod_base = OTHER; note = 2'-O-methoxyethyl modified thymine with phosphorothioate linkage
  modified_base 20: mod_base = OTHER; note = 2'-O-methoxyethyl modified thymine
  misc_feature 1..4: note = RNA
  misc_feature 5..15: note = DNA
  misc_feature 16..20: note = RNA
gccaccgcctcgttctcttt

SEQ ID NO: 417 - DNA, 20 bp, synthetic construct
  source 1..20: mol_type = other DNA
  modified_base 1: mod_base = OTHER; note = 2'-O-methoxyethyl modified thymine with phosphorothioate linkage
  modified_base 2: mod_base = OTHER; note = 2'-O-methoxyethyl modified 5-methylcytosine
  modified_base 3: mod_base = OTHER; note = 2'-O-methoxyethyl modified nucleotide
  modified_base 4: mod_base = OTHER; note = 2'-O-methoxyethyl modified 5-methylcytosine with phosphorothioate linkage
  modified_base 5: mod_base = OTHER; note = Nucleotide with phosphorothioate linkage
  modified_base 6: mod_base = OTHER; note = Nucleotide with phosphorothioate linkage
  modified_base 7: mod_base = OTHER; note = Nucleotide with phosphorothioate linkage
  modified_base 8: mod_base = OTHER; note = Nucleotide with phosphorothioate linkage
  modified_base 9: mod_base = OTHER; note = 5-methylcytosine with phosphorothioate linkage
  modified_base 10: mod_base = OTHER; note = Nucleotide with phosphorothioate linkage
  modified_base 11: mod_base = OTHER; note = Nucleotide with phosphorothioate linkage
  modified_base 12: mod_base = OTHER; note = Nucleotide with phosphorothioate linkage
  modified_base 13: mod_base = OTHER; note = Nucleotide with phosphorothioate linkage
  modified_base 14: mod_base = OTHER; note = Nucleotide with phosphorothioate linkage
  modified_base 15: mod_base = OTHER; note = 5-methylcytosine with phosphorothioate linkage
  modified_base 16: mod_base = OTHER; note = 2'-O-methoxyethyl modified nucleotide
  modified_base 17: mod_base = OTHER; note = 2'-O-methoxyethyl modified 5-methylcytosine
  modified_base 18: mod_base = OTHER; note = 2'-O-methoxyethyl modified 5-methylcytosine
  modified_base 19: mod_base = OTHER; note = 2'-O-methoxyethyl modified 5-methylcytosine with phosphorothioate linkage
  modified_base 20: mod_base = OTHER; note = 2'-O-methoxyethyl modified thymine
  misc_feature 1..4: note = RNA
  misc_feature 5..15: note = DNA
  misc_feature 16..20: note = RNA
tcactggtcgtagtcgccct

SEQ ID NO: 418 - DNA, 20 bp, synthetic construct
  source 1..20: mol_type = other DNA
  modified_base 1: mod_base = OTHER; note = 2'-O-methoxyethyl modified nucleotide with phosphorothioate linkage
  modified_base 2: mod_base = OTHER; note = 2'-O-methoxyethyl modified thymine
  modified_base 3: mod_base = OTHER; note = 2'-O-methoxyethyl modified thymine
  modified_base 4: mod_base = OTHER; note = 2'-O-methoxyethyl modified 5-methylcytosine with phosphorothioate linkage
  modified_base 5: mod_base = OTHER; note = Nucleotide with phosphorothioate linkage
  modified_base 6: mod_base = OTHER; note = Nucleotide with phosphorothioate linkage
  modified_base 7: mod_base = OTHER; note = Nucleotide with phosphorothioate linkage
  modified_base 8: mod_base = OTHER; note = Nucleotide with phosphorothioate linkage
  modified_base 9: mod_base = OTHER; note = Nucleotide with phosphorothioate linkage
  modified_base 10: mod_base = OTHER; note = Nucleotide with phosphorothioate linkage
  modified_base 11: mod_base = OTHER; note = 5-methylcytosine with phosphorothioate linkage
  modified_base 12: mod_base = OTHER; note = Nucleotide with phosphorothioate linkage
  modified_base 13: mod_base = OTHER; note = Nucleotide with phosphorothioate linkage
  modified_base 14: mod_base = OTHER; note = Nucleotide with phosphorothioate linkage
  modified_base 15: mod_base = OTHER; note = 5-methylcytosine with phosphorothioate linkage
  modified_base 16: mod_base = OTHER; note = 2'-O-methoxyethyl modified thymine
  modified_base 17: mod_base = OTHER; note = 2'-O-methoxyethyl modified 5-methylcytosine
  modified_base 18: mod_base = OTHER; note = 2'-O-methoxyethyl modified thymine
  modified_base 19: mod_base = OTHER; note = 2'-O-methoxyethyl modified thymine with phosphorothioate linkage
  modified_base 20: mod_base = OTHER; note = 2'-O-methoxyethyl modified nucleotide
  misc_feature 1..4: note = RNA
  misc_feature 5..15: note = DNA
  misc_feature 16..20: note = RNA
attctaaaatcaggctctta

SEQ ID NO: 419 - DNA, 20 bp, synthetic construct
  source 1..20: mol_type = other DNA
  modified_base 1: mod_base = OTHER; note = 2'-O-methoxyethyl modified 5-methylcytosine with phosphorothioate linkage
  modified_base 2: mod_base = OTHER; note = 2'-O-methoxyethyl modified thymine
  modified_base 3: mod_base = OTHER; note = 2'-O-methoxyethyl modified nucleotide
  modified_base 4: mod_base = OTHER; note = 2'-O-methoxyethyl modified nucleotide with phosphorothioate linkage
  modified_base 5: mod_base = OTHER; note = Nucleotide with phosphorothioate linkage
  modified_base 6: mod_base = OTHER; note = Nucleotide with phosphorothioate linkage
  modified_base 7: mod_base = OTHER; note = Nucleotide with phosphorothioate linkage
  modified_base 8: mod_base = OTHER; note = Nucleotide with phosphorothioate linkage
  modified_base 9: mod_base = OTHER; note = Nucleotide with phosphorothioate linkage
  modified_base 10: mod_base = OTHER; note = Nucleotide with phosphorothioate linkage
  modified_base 11: mod_base = OTHER; note = 5-methylcytosine with phosphorothioate linkage
  modified_base 12: mod_base = OTHER; note = Nucleotide with phosphorothioate linkage
  modified_base 13: mod_base = OTHER; note = Nucleotide with phosphorothioate linkage
  modified_base 14: mod_base = OTHER; note = Nucleotide with phosphorothioate linkage
  modified_base 15: mod_base = OTHER; note = Nucleotide with phosphorothioate linkage
  modified_base 16: mod_base = OTHER; note = 2'-O-methoxyethyl modified nucleotide
  modified_base 17: mod_base = OTHER; note = 2'-O-methoxyethyl modified thymine
  modified_base 18: mod_base = OTHER; note = 2'-O-methoxyethyl modified 5-methylcytosine
  modified_base 19: mod_base = OTHER; note = 2'-O-methoxyethyl modified nucleotide with phosphorothioate linkage
  modified_base 20: mod_base = OTHER; note = 2'-O-methoxyethyl modified nucleotide
  misc_feature 1..4: note = RNA
  misc_feature 5..15: note = DNA
  misc_feature 16..20: note = RNA
ctggtgaattctaaaatcag

SEQ ID NO: 420 - DNA, 20 bp, synthetic construct
  source 1..20: mol_type = other DNA
  modified_base 1: mod_base = OTHER; note = 2'-O-methoxyethyl modified 5-methylcytosine with phosphorothioate linkage
  modified_base 2: mod_base = OTHER; note = 2'-O-methoxyethyl modified thymine
  modified_base 3: mod_base = OTHER; note = 2'-O-methoxyethyl modified thymine
  modified_base 4: mod_base = OTHER; note = 2'-O-methoxyethyl modified 5-methylcytosine with phosphorothioate linkage
  modified_base 5: mod_base = OTHER; note = Nucleotide with phosphorothioate linkage
  modified_base 6: mod_base = OTHER; note = Nucleotide with phosphorothioate linkage
  modified_base 7: mod_base = OTHER; note = Nucleotide with phosphorothioate linkage
  modified_base 8: mod_base = OTHER; note = Nucleotide with phosphorothioate linkage
  modified_base 9: mod_base = OTHER; note = Nucleotide with phosphorothioate linkage
  modified_base 10: mod_base = OTHER; note = Nucleotide with phosphorothioate linkage
  modified_base 11: mod_base = OTHER; note = Nucleotide with phosphorothioate linkage
  modified_base 12: mod_base = OTHER; note = 5-methylcytosine with phosphorothioate linkage
  modified_base 13: mod_base = OTHER; note = Nucleotide with phosphorothioate linkage
  modified_base 14: mod_base = OTHER; note = Nucleotide with phosphorothioate linkage
  modified_base 15: mod_base = OTHER; note = Nucleotide with phosphorothioate linkage
  modified_base 16: mod_base = OTHER; note = 2'-O-methoxyethyl modified thymine
  modified_base 17: mod_base = OTHER; note = 2'-O-methoxyethyl modified nucleotide
  modified_base 18: mod_base = OTHER; note = 2'-O-methoxyethyl modified nucleotide
  modified_base 19: mod_base = OTHER; note = 2'-O-methoxyethyl modified nucleotide with phosphorothioate linkage
  modified_base 20: mod_base = OTHER; note = 2'-O-methoxyethyl modified thymine
  misc_feature 1..4: note = RNA
  misc_feature 5..15: note = DNA
  misc_feature 16..20: note = RNA
cttctgaggagctggtgaat

SEQ ID NO: 421 - DNA, 20 bp, synthetic construct
  source 1..20: mol_type = other DNA
  modified_base 1: mod_base = OTHER; note = 2'-O-methoxyethyl modified nucleotide with phosphorothioate linkage
  modified_base 2: mod_base = OTHER; note = 2'-O-methoxyethyl modified 5-methylcytosine
  modified_base 3: mod_base = OTHER; note = 2'-O-methoxyethyl modified thymine
  modified_base 4: mod_base = OTHER; note = 2'-O-methoxyethyl modified thymine with phosphorothioate linkage
  modified_base 5: mod_base = OTHER; note = 5-methylcytosine with phosphorothioate linkage
  modified_base 6: mod_base = OTHER; note = Nucleotide with phosphorothioate linkage
  modified_base 7: mod_base = OTHER; note = Nucleotide with phosphorothioate linkage
  modified_base 8: mod_base = OTHER; note = Nucleotide with phosphorothioate linkage
  modified_base 9: mod_base = OTHER; note = Nucleotide with phosphorothioate linkage
  modified_base 10: mod_base = OTHER; note = Nucleotide with phosphorothioate linkage
  modified_base 11: mod_base = OTHER; note = Nucleotide with phosphorothioate linkage
  modified_base 12: mod_base = OTHER; note = Nucleotide with phosphorothioate linkage
  modified_base 13: mod_base = OTHER; note = 5-methylcytosine with phosphorothioate linkage
  modified_base 14: mod_base = OTHER; note = Nucleotide with phosphorothioate linkage
  modified_base 15: mod_base = OTHER; note = Nucleotide with phosphorothioate linkage
  modified_base 16: mod_base = OTHER; note = 2'-O-methoxyethyl modified nucleotide
  modified_base 17: mod_base = OTHER; note = 2'-O-methoxyethyl modified thymine
  modified_base 18: mod_base = OTHER; note = 2'-O-methoxyethyl modified nucleotide
  modified_base 19: mod_base = OTHER; note = 2'-O-methoxyethyl modified nucleotide with phosphorothioate linkage
  modified_base 20: mod_base = OTHER; note = 2'-O-methoxyethyl modified nucleotide
  misc_feature 1..4: note = RNA
  misc_feature 5..15: note = DNA
  misc_feature 16..20: note = RNA
acttctgaggagctggtgaa

SEQ ID NO: 422 - DNA, 20 bp, synthetic construct
  source 1..20: mol_type = other DNA
  modified_base 1: mod_base = OTHER; note = 2'-O-methoxyethyl modified nucleotide with phosphorothioate linkage
  modified_base 2: mod_base = OTHER; note = 2'-O-methoxyethyl modified nucleotide
  modified_base 3: mod_base = OTHER; note = 2'-O-methoxyethyl modified 5-methylcytosine
  modified_base 4: mod_base = OTHER; note = 2'-O-methoxyethyl modified thymine with phosphorothioate linkage
  modified_base 5: mod_base = OTHER; note = Nucleotide with phosphorothioate linkage
  modified_base 6: mod_base = OTHER; note = 5-methylcytosine with phosphorothioate linkage
  modified_base 7: mod_base = OTHER; note = Nucleotide with phosphorothioate linkage
  modified_base 8: mod_base = OTHER; note = Nucleotide with phosphorothioate linkage
  modified_base 9: mod_base = OTHER; note = Nucleotide with phosphorothioate linkage
  modified_base 10: mod_base = OTHER; note = Nucleotide with phosphorothioate linkage
  modified_base 11: mod_base = OTHER; note = Nucleotide with phosphorothioate linkage
  modified_base 12: mod_base = OTHER; note = Nucleotide with phosphorothioate linkage
  modified_base 13: mod_base = OTHER; note = Nucleotide with phosphorothioate linkage
  modified_base 14: mod_base = OTHER; note = 5-methylcytosine with phosphorothioate linkage
  modified_base 15: mod_base = OTHER; note = Nucleotide with phosphorothioate linkage
  modified_base 16: mod_base = OTHER; note = 2'-O-methoxyethyl modified nucleotide
  modified_base 17: mod_base = OTHER; note = 2'-O-methoxyethyl modified nucleotide
  modified_base 18: mod_base = OTHER; note = 2'-O-methoxyethyl modified thymine
  modified_base 19: mod_base = OTHER; note = 2'-O-methoxyethyl modified nucleotide with phosphorothioate linkage
  modified_base 20: mod_base = OTHER; note = 2'-O-methoxyethyl modified nucleotide
  misc_feature 1..4: note = RNA
  misc_feature 5..15: note = DNA
  misc_feature 16..20: note = RNA
aacttctgaggagctggtga

SEQ ID NO: 423 - DNA, 20 bp, synthetic construct
  source 1..20: mol_type = other DNA
  modified_base 1: mod_base = OTHER; note = 2'-O-methoxyethyl modified nucleotide with phosphorothioate linkage
  modified_base 2: mod_base = OTHER; note = 2'-O-methoxyethyl modified nucleotide
  modified_base 3: mod_base = OTHER; note = 2'-O-methoxyethyl modified nucleotide
  modified_base 4: mod_base = OTHER; note = 2'-O-methoxyethyl modified 5-methylcytosine with phosphorothioate linkage
  modified_base 5: mod_base = OTHER; note = Nucleotide with phosphorothioate linkage
  modified_base 6: mod_base = OTHER; note = Nucleotide with phosphorothioate linkage
  modified_base 7: mod_base = OTHER; note = 5-methylcytosine with phosphorothioate linkage
  modified_base 8: mod_base = OTHER; note = Nucleotide with phosphorothioate linkage
  modified_base 9: mod_base = OTHER; note = Nucleotide with phosphorothioate linkage
  modified_base 10: mod_base = OTHER; note = Nucleotide with phosphorothioate linkage
  modified_base 11: mod_base = OTHER; note = Nucleotide with phosphorothioate linkage
  modified_base 12: mod_base = OTHER; note = Nucleotide with phosphorothioate linkage
  modified_base 13: mod_base = OTHER; note = Nucleotide with phosphorothioate linkage
  modified_base 14: mod_base = OTHER; note = Nucleotide with phosphorothioate linkage
  modified_base 15: mod_base = OTHER; note = 5-methylcytosine with phosphorothioate linkage
  modified_base 16: mod_base = OTHER; note = 2'-O-methoxyethyl modified thymine
  modified_base 17: mod_base = OTHER; note = 2'-O-methoxyethyl modified nucleotide
  modified_base 18: mod_base = OTHER; note = 2'-O-methoxyethyl modified nucleotide
  modified_base 19: mod_base = OTHER; note = 2'-O-methoxyethyl modified thymine with phosphorothioate linkage
  modified_base 20: mod_base = OTHER; note = 2'-O-methoxyethyl modified nucleotide
  misc_feature 1..4: note = RNA
  misc_feature 5..15: note = DNA
  misc_feature 16..20: note = RNA
aaacttctgaggagctggtg

SEQ ID NO: 424 - DNA, 20 bp, synthetic construct
  source 1..20: mol_type = other DNA
  modified_base 1: mod_base = OTHER; note = 2'-O-methoxyethyl modified 5-methylcytosine with phosphorothioate linkage
  modified_base 2: mod_base = OTHER; note = 2'-O-methoxyethyl modified nucleotide
  modified_base 3: mod_base = OTHER; note = 2'-O-methoxyethyl modified nucleotide
  modified_base 4: mod_base = OTHER; note = 2'-O-methoxyethyl modified nucleotide with phosphorothioate linkage
  modified_base 5: mod_base = OTHER; note = 5-methylcytosine with phosphorothioate linkage
  modified_base 6: mod_base = OTHER; note = Nucleotide with phosphorothioate linkage
  modified_base 7: mod_base = OTHER; note = Nucleotide with phosphorothioate linkage
  modified_base 8: mod_base = OTHER; note = 5-methylcytosine with phosphorothioate linkage
  modified_base 9: mod_base = OTHER; note = Nucleotide with phosphorothioate linkage
  modified_base 10: mod_base = OTHER; note = Nucleotide with phosphorothioate linkage
  modified_base 11: mod_base = OTHER; note = Nucleotide with phosphorothioate linkage
  modified_base 12: mod_base = OTHER; note = Nucleotide with phosphorothioate linkage
  modified_base 13: mod_base = OTHER; note = Nucleotide with phosphorothioate linkage
  modified_base 14: mod_base = OTHER; note = Nucleotide with phosphorothioate linkage
  modified_base 15: mod_base = OTHER; note = Nucleotide with phosphorothioate linkage
  modified_base 16: mod_base = OTHER; note = 2'-O-methoxyethyl modified 5-methylcytosine
  modified_base 17: mod_base = OTHER; note = 2'-O-methoxyethyl modified thymine
  modified_base 18: mod_base = OTHER; note = 2'-O-methoxyethyl modified nucleotide
  modified_base 19: mod_base = OTHER; note = 2'-O-methoxyethyl modified nucleotide with phosphorothioate linkage
  modified_base 20: mod_base = OTHER; note = 2'-O-methoxyethyl modified thymine
  misc_feature 1..4: note = RNA
  misc_feature 5..15: note = DNA
  misc_feature 16..20: note = RNA
caaacttctgaggagctggt

SEQ ID NO: 425 - DNA, 20 bp, synthetic construct
  source 1..20: mol_type = other DNA
  modified_base 1: mod_base = OTHER; note = 2'-O-methoxyethyl modified nucleotide with phosphorothioate linkage
  modified_base 2: mod_base = OTHER; note = 2'-O-methoxyethyl modified 5-methylcytosine
  modified_base 3: mod_base = OTHER; note = 2'-O-methoxyethyl modified 5-methylcytosine
  modified_base 4: mod_base = OTHER; note = 2'-O-methoxyethyl modified nucleotide with phosphorothioate linkage
  modified_base 5: mod_base = OTHER; note = Nucleotide with phosphorothioate linkage
  modified_base 6: mod_base = OTHER; note = Nucleotide with phosphorothioate linkage
  modified_base 7: mod_base = OTHER; note = 5-methylcytosine with phosphorothioate linkage
  modified_base 8: mod_base = OTHER; note = Nucleotide with phosphorothioate linkage
  modified_base 9: mod_base = OTHER; note = Nucleotide with phosphorothioate linkage
  modified_base 10: mod_base = OTHER; note = 5-methylcytosine with phosphorothioate linkage
  modified_base 11: mod_base = OTHER; note = Nucleotide with phosphorothioate linkage
  modified_base 12: mod_base = OTHER; note = Nucleotide with phosphorothioate linkage
  modified_base 13: mod_base = OTHER; note = Nucleotide with phosphorothioate linkage
  modified_base 14: mod_base = OTHER; note = Nucleotide with phosphorothioate linkage
  modified_base 15: mod_base = OTHER; note = Nucleotide with phosphorothioate linkage
  modified_base 16: mod_base = OTHER; note = 2'-O-methoxyethyl modified nucleotide
  modified_base 17: mod_base = OTHER; note = 2'-O-methoxyethyl modified nucleotide
  modified_base 18: mod_base = OTHER; note = 2'-O-methoxyethyl modified 5-methylcytosine
  modified_base 19: mod_base = OTHER; note = 2'-O-methoxyethyl modified thymine with phosphorothioate linkage
  modified_base 20: mod_base = OTHER; note = 2'-O-methoxyethyl modified nucleotide
  misc_feature 1..4: note = RNA
  misc_feature 5..15: note = DNA
  misc_feature 16..20: note = RNA
gccaaacttctgaggagctg

SEQ ID NO: 426 - DNA, 20 bp, synthetic construct
  source 1..20: mol_type = other DNA
  modified_base 1: mod_base = OTHER; note = 2'-O-methoxyethyl modified 5-methylcytosine with phosphorothioate linkage
  modified_base 2: mod_base = OTHER; note = 2'-O-methoxyethyl modified nucleotide
  modified_base 3: mod_base = OTHER; note = 2'-O-methoxyethyl modified 5-methylcytosine
  modified_base 4: mod_base = OTHER; note = 2'-O-methoxyethyl modified 5-methylcytosine with phosphorothioate linkage
  modified_base 5: mod_base = OTHER; note = Nucleotide with phosphorothioate linkage
  modified_base 6: mod_base = OTHER; note = Nucleotide with phosphorothioate linkage
  modified_base 7: mod_base = OTHER; note = Nucleotide with phosphorothioate linkage
  modified_base 8: mod_base = OTHER; note = 5-methylcytosine with phosphorothioate linkage
  modified_base 9: mod_base = OTHER; note = Nucleotide with phosphorothioate linkage
  modified_base 10: mod_base = OTHER; note = Nucleotide with phosphorothioate linkage
  modified_base 11: mod_base = OTHER; note = 5-methylcytosine with phosphorothioate linkage
  modified_base 12: mod_base = OTHER; note = Nucleotide with phosphorothioate linkage
  modified_base 13: mod_base = OTHER; note = Nucleotide with phosphorothioate linkage
  modified_base 14: mod_base = OTHER; note = Nucleotide with phosphorothioate linkage
  modified_base 15: mod_base = OTHER; note = Nucleotide with phosphorothioate linkage
  modified_base 16: mod_base = OTHER; note = 2'-O-methoxyethyl modified nucleotide
  modified_base 17: mod_base = OTHER; note = 2'-O-methoxyethyl modified nucleotide
  modified_base 18: mod_base = OTHER; note = 2'-O-methoxyethyl modified nucleotide
  modified_base 19: mod_base = OTHER; note = 2'-O-methoxyethyl modified 5-methylcytosine with phosphorothioate linkage
  modified_base 20: mod_base = OTHER; note = 2'-O-methoxyethyl modified thymine
  misc_feature 1..4: note = RNA
  misc_feature 5..15: note = DNA
  misc_feature 16..20: note = RNA
cgccaaacttctgaggagct

SEQ ID NO: 427 - DNA, 20 bp, synthetic construct
  source 1..20: mol_type = other DNA
  modified_base 1: mod_base = OTHER; note = 2'-O-methoxyethyl modified thymine with phosphorothioate linkage
  modified_base 2: mod_base = OTHER; note = 2'-O-methoxyethyl modified 5-methylcytosine
  modified_base 3: mod_base = OTHER; note = 2'-O-methoxyethyl modified nucleotide
  modified_base 4: mod_base = OTHER; note = 2'-O-methoxyethyl modified 5-methylcytosine with phosphorothioate linkage
  modified_base 5: mod_base = OTHER; note = 5-methylcytosine with phosphorothioate linkage
  modified_base 6: mod_base = OTHER; note = Nucleotide with phosphorothioate linkage
  modified_base 7: mod_base = OTHER; note = Nucleotide with phosphorothioate linkage
  modified_base 8: mod_base = OTHER; note = Nucleotide with phosphorothioate linkage
  modified_base 9: mod_base = OTHER; note = 5-methylcytosine with phosphorothioate linkage
  modified_base 10: mod_base = OTHER; note = Nucleotide with phosphorothioate linkage
  modified_base 11: mod_base = OTHER; note = Nucleotide with phosphorothioate linkage
  modified_base 12: mod_base = OTHER; note = 5-methylcytosine with phosphorothioate linkage
  modified_base 13: mod_base = OTHER; note = Nucleotide with phosphorothioate linkage
  modified_base 14: mod_base = OTHER; note = Nucleotide with phosphorothioate linkage
  modified_base 15: mod_base = OTHER; note = Nucleotide with phosphorothioate linkage
  modified_base 16: mod_base = OTHER; note = 2'-O-methoxyethyl modified nucleotide
  modified_base 17: mod_base = OTHER; note = 2'-O-methoxyethyl modified nucleotide
  modified_base 18: mod_base = OTHER; note = 2'-O-methoxyethyl modified nucleotide
  modified_base 19: mod_base = OTHER; note = 2'-O-methoxyethyl modified nucleotide with phosphorothioate linkage
  modified_base 20: mod_base = OTHER; note = 2'-O-methoxyethyl modified 5-methylcytosine
  misc_feature 1..4: note = RNA
  misc_feature 5..15: note = DNA
  misc_feature 16..20: note = RNA
tcgccaaacttctgaggagc

SEQ ID NO: 428 - DNA, 20 bp, synthetic construct
  source 1..20: mol_type = other DNA
  modified_base 1: mod_base = OTHER; note = 2'-O-methoxyethyl modified thymine with phosphorothioate linkage
  modified_base 2: mod_base = OTHER; note = 2'-O-methoxyethyl modified thymine
  modified_base 3: mod_base = OTHER; note = 2'-O-methoxyethyl modified 5-methylcytosine
  modified_base 4: mod_base = OTHER; note = 2'-O-methoxyethyl modified nucleotide with phosphorothioate linkage
  modified_base 5: mod_base = OTHER; note = 5-methylcytosine with phosphorothioate linkage
  modified_base 6: mod_base = OTHER; note = 5-methylcytosine with phosphorothioate linkage
  modified_base 7: mod_base = OTHER; note = Nucleotide with phosphorothioate linkage
  modified_base 8: mod_base = OTHER; note = Nucleotide with phosphorothioate linkage
  modified_base 9: mod_base = OTHER; note = Nucleotide with phosphorothioate linkage
  modified_base 10: mod_base = OTHER; note = 5-methylcytosine with phosphorothioate linkage
  modified_base 11: mod_base = OTHER; note = Nucleotide with phosphorothioate linkage
  modified_base 12: mod_base = OTHER; note = Nucleotide with phosphorothioate linkage
  modified_base 13: mod_base = OTHER; note = 5-methylcytosine with phosphorothioate linkage
  modified_base 14: mod_base = OTHER; note = Nucleotide with phosphorothioate linkage
  modified_base 15: mod_base = OTHER; note = Nucleotide with phosphorothioate linkage
  modified_base 16: mod_base = OTHER; note = 2'-O-methoxyethyl modified nucleotide
  modified_base 17: mod_base = OTHER; note = 2'-O-methoxyethyl modified nucleotide
  modified_base 18: mod_base = OTHER; note = 2'-O-methoxyethyl modified nucleotide
  modified_base 19: mod_base = OTHER; note = 2'-O-methoxyethyl modified nucleotide with phosphorothioate linkage
  modified_base 20: mod_base = OTHER; note = 2'-O-methoxyethyl modified nucleotide
  misc_feature 1..4: note = RNA
  misc_feature 5..15: note = DNA
  misc_feature 16..20: note = RNA
ttcgccaaacttctgaggag

SEQ ID NO: 429 - DNA, 20 bp, synthetic construct
  source 1..20: mol_type = other DNA
  modified_base 1: mod_base = OTHER; note = 2'-O-methoxyethyl modified nucleotide with phosphorothioate linkage
  modified_base 2: mod_base = OTHER; note = 2'-O-methoxyethyl modified 5-methylcytosine
  modified_base 3: mod_base = OTHER; note = 2'-O-methoxyethyl modified thymine
  modified_base 4: mod_base = OTHER; note = 2'-O-methoxyethyl modified nucleotide with phosphorothioate linkage
  modified_base 5: mod_base = OTHER; note = 5-methylcytosine with phosphorothioate linkage
  modified_base 6: mod_base = OTHER; note = 5-methylcytosine with phosphorothioate linkage
  modified_base 7: mod_base = OTHER; note = Nucleotide with phosphorothioate linkage
  modified_base 8: mod_base = OTHER; note = Nucleotide with phosphorothioate linkage
  modified_base 9: mod_base = OTHER; note = Nucleotide with phosphorothioate linkage
  modified_base 10: mod_base = OTHER; note = Nucleotide with phosphorothioate linkage
  modified_base 11: mod_base = OTHER; note = Nucleotide with phosphorothioate linkage
  modified_base 12: mod_base = OTHER; note = 5-methylcytosine with phosphorothioate linkage
  modified_base 13: mod_base = OTHER; note = Nucleotide with phosphorothioate linkage
  modified_base 14: mod_base = OTHER; note = Nucleotide with phosphorothioate linkage
  modified_base 15: mod_base = OTHER; note = Nucleotide with phosphorothioate linkage
  modified_base 16: mod_base = OTHER; note = 2'-O-methoxyethyl modified nucleotide
  modified_base 17: mod_base = OTHER; note = 2'-O-methoxyethyl modified 5-methylcytosine
  modified_base 18: mod_base = OTHER; note = 2'-O-methoxyethyl modified nucleotide
  modified_base 19: mod_base = OTHER; note = 2'-O-methoxyethyl modified thymine with phosphorothioate linkage
  modified_base 20: mod_base = OTHER; note = 2'-O-methoxyethyl modified nucleotide
  misc_feature 1..4: note = RNA
  misc_feature 5..15: note = DNA
  misc_feature 16..20: note = RNA
gctaccttgatctgagcgta

SEQ ID NO: 430 - DNA, 20 bp, synthetic construct
  source 1..20: mol_type = other DNA
  modified_base 1: mod_base = OTHER; note = 2'-O-methoxyethyl modified thymine with phosphorothioate linkage
  modified_base 2: mod_base = OTHER; note = 2'-O-methoxyethyl modified nucleotide
  modified_base 3: mod_base = OTHER; note = 2'-O-methoxyethyl modified 5-methylcytosine
  modified_base 4: mod_base = OTHER; note = 2'-O-methoxyethyl modified thymine with phosphorothioate linkage
  modified_base 5: mod_base = OTHER; note = Nucleotide with phosphorothioate linkage
  modified_base 6: mod_base = OTHER; note = 5-methylcytosine with phosphorothioate linkage
  modified_base 7: mod_base = OTHER; note = 5-methylcytosine with phosphorothioate linkage
  modified_base 8: mod_base = OTHER; note = Nucleotide with phosphorothioate linkage
  modified_base 9: mod_base = OTHER; note = Nucleotide with phosphorothioate linkage
  modified_base 10: mod_base = OTHER; note = Nucleotide with phosphorothioate linkage
  modified_base 11: mod_base = OTHER; note = Nucleotide with phosphorothioate linkage
  modified_base 12: mod_base = OTHER; note = Nucleotide with phosphorothioate linkage
  modified_base 13: mod_base = OTHER; note = 5-methylcytosine with phosphorothioate linkage
  modified_base 14: mod_base = OTHER; note = Nucleotide with phosphorothioate linkage
  modified_base 15: mod_base = OTHER; note = Nucleotide with phosphorothioate linkage
  modified_base 16: mod_base = OTHER; note = 2'-O-methoxyethyl modified nucleotide
  modified_base 17: mod_base = OTHER; note = 2'-O-methoxyethyl modified nucleotide
  modified_base 18: mod_base = OTHER; note = 2'-O-methoxyethyl modified 5-methylcytosine
  modified_base 19: mod_base = OTHER; note = 2'-O-methoxyethyl modified nucleotide with phosphorothioate linkage
  modified_base 20: mod_base = OTHER; note = 2'-O-methoxyethyl modified thymine
  misc_feature 1..4: note = RNA
  misc_feature 5..15: note = DNA
  misc_feature 16..20: note = RNA
tgctaccttgatctgagcgt

SEQ ID NO: 431 - DNA, 20 bp, synthetic construct
  source 1..20: mol_type = other DNA
  modified_base 1: mod_base = OTHER; note = 2'-O-methoxyethyl modified 5-methylcytosine with phosphorothioate linkage
  modified_base 2: mod_base = OTHER; note = 2'-O-methoxyethyl modified thymine
  modified_base 3: mod_base = OTHER; note = 2'-O-methoxyethyl modified nucleotide
  modified_base 4: mod_base = OTHER; note = 2'-O-methoxyethyl modified nucleotide with phosphorothioate linkage
  modified_base 5: mod_base = OTHER; note = 5-methylcytosine with phosphorothioate linkage
  modified_base 6: mod_base = OTHER; note = Nucleotide with phosphorothioate linkage
  modified_base 7: mod_base = OTHER; note = Nucleotide with phosphorothioate linkage
  modified_base 8: mod_base = OTHER; note = 5-methylcytosine with phosphorothioate linkage
  modified_base 9: mod_base = OTHER; note = Nucleotide with phosphorothioate linkage
  modified_base 10: mod_base = OTHER; note = Nucleotide with phosphorothioate linkage
  modified_base 11: mod_base = OTHER; note = 5-methylcytosine with phosphorothioate linkage
  modified_base 12: mod_base = OTHER; note = 5-methylcytosine with phosphorothioate linkage
  modified_base 13: mod_base = OTHER; note = Nucleotide with phosphorothioate linkage
  modified_base 14: mod_base = OTHER; note = Nucleotide with phosphorothioate linkage
  modified_base 15: mod_base = OTHER; note = Nucleotide with phosphorothioate linkage
  modified_base 16: mod_base = OTHER; note = 2'-O-methoxyethyl modified nucleotide
  modified_base 17: mod_base = OTHER; note = 2'-O-methoxyethyl modified thymine
  modified_base 18: mod_base = OTHER; note = 2'-O-methoxyethyl modified 5-methylcytosine
  modified_base 19: mod_base = OTHER; note = 2'-O-methoxyethyl modified thymine with phosphorothioate linkage
  modified_base 20: mod_base = OTHER; note = 2'-O-methoxyethyl modified nucleotide
  misc_feature 1..4: note = RNA
  misc_feature 5..15: note = DNA
  misc_feature 16..20: note = RNA
ctagctgctaccttgatctg

SEQ ID NO: 432 - DNA, 20 bp, synthetic construct
  source 1..20: mol_type = other DNA
  modified_base 1: mod_base = OTHER; note = 2'-O-methoxyethyl modified nucleotide with phosphorothioate linkage
  modified_base 2: mod_base = OTHER; note = 2'-O-methoxyethyl modified thymine
  modified_base 3: mod_base = OTHER; note = 2'-O-methoxyethyl modified 5-methylcytosine
  modified_base 4: mod_base = OTHER; note = 2'-O-methoxyethyl modified thymine with phosphorothioate linkage
  modified_base 5: mod_base = OTHER; note = Nucleotide with phosphorothioate linkage
  modified_base 6: mod_base = OTHER; note = Nucleotide with phosphorothioate linkage
  modified_base 7: mod_base = OTHER; note = 5-methylcytosine with phosphorothioate linkage
  modified_base 8: mod_base = OTHER; note = Nucleotide with phosphorothioate linkage
  modified_base 9: mod_base = OTHER; note = Nucleotide with phosphorothioate linkage
  modified_base 10: mod_base = OTHER; note = 5-methylcytosine with phosphorothioate linkage
  modified_base 11: mod_base = OTHER; note = Nucleotide with phosphorothioate linkage
  modified_base 12: mod_base = OTHER; note = Nucleotide with phosphorothioate linkage
  modified_base 13: mod_base = OTHER; note = 5-methylcytosine with phosphorothioate linkage
  modified_base 14: mod_base = OTHER; note = 5-methylcytosine with phosphorothioate linkage
  modified_base 15: mod_base = OTHER; note = Nucleotide with phosphorothioate linkage
  modified_base 16: mod_base = OTHER; note = 2'-O-methoxyethyl modified thymine
  modified_base 17: mod_base = OTHER; note = 2'-O-methoxyethyl modified nucleotide
  modified_base 18: mod_base = OTHER; note = 2'-O-methoxyethyl modified nucleotide
  modified_base 19: mod_base = OTHER; note = 2'-O-methoxyethyl modified thymine with phosphorothioate linkage
  modified_base 20: mod_base = OTHER; note = 2'-O-methoxyethyl modified 5-methylcytosine
  misc_feature 1..4: note = RNA
  misc_feature 5..15: note = DNA
  misc_feature 16..20: note = RNA
gtctagctgctaccttgatc

SEQ ID NO: 433 - DNA, 20 bp, synthetic construct
  source 1..20: mol_type = other DNA
  modified_base 1: mod_base = OTHER; note = 2'-O-methoxyethyl modified 5-methylcytosine with phosphorothioate linkage
  modified_base 2: mod_base = OTHER; note = 2'-O-methoxyethyl modified nucleotide
  modified_base 3: mod_base = OTHER; note = 2'-O-methoxyethyl modified nucleotide
  modified_base 4: mod_base = OTHER; note = 2'-O-methoxyethyl modified thymine with phosphorothioate linkage
  modified_base 5: mod_base = OTHER; note = 5-methylcytosine with phosphorothioate linkage
  modified_base 6: mod_base = OTHER; note = Nucleotide with phosphorothioate linkage
  modified_base 7: mod_base = OTHER; note = Nucleotide with phosphorothioate linkage
  modified_base 8: mod_base = OTHER; note = Nucleotide with phosphorothioate linkage
  modified_base 9: mod_base = OTHER; note = 5-methylcytosine with phosphorothioate linkage
  modified_base 10: mod_base = OTHER; note = Nucleotide with phosphorothioate linkage
  modified_base 11: mod_base = OTHER; note = Nucleotide with phosphorothioate linkage
  modified_base 12: mod_base = OTHER; note = 5-methylcytosine with phosphorothioate linkage
  modified_base 13: mod_base = OTHER; note = Nucleotide with phosphorothioate linkage
  modified_base 14: mod_base = OTHER; note = Nucleotide with phosphorothioate linkage
  modified_base 15: mod_base = OTHER; note = 5-methylcytosine with phosphorothioate linkage
  modified_base 16: mod_base = OTHER; note = 2'-O-methoxyethyl modified 5-methylcytosine
  modified_base 17: mod_base = OTHER; note = 2'-O-methoxyethyl modified thymine
  modified_base 18: mod_base = OTHER; note = 2'-O-methoxyethyl modified thymine
  modified_base 19: mod_base = OTHER; note = 2'-O-methoxyethyl modified nucleotide with phosphorothioate linkage
  modified_base 20: mod_base = OTHER; note = 2'-O-methoxyethyl modified nucleotide
  misc_feature 1..4: note = RNA
  misc_feature 5..15: note = DNA
  misc_feature 16..20: note = RNA
cagtctagctgctaccttga

SEQ ID NO: 434 - DNA, 20 bp, synthetic construct
  source 1..20: mol_type = other DNA
  modified_base 1: mod_base = OTHER; note = 2'-O-methoxyethyl modified 5-methylcytosine with phosphorothioate linkage
  modified_base 2: mod_base = OTHER; note = 2'-O-methoxyethyl modified 5-methylcytosine
  modified_base 3: mod_base = OTHER; note = 2'-O-methoxyethyl modified nucleotide
  modified_base 4: mod_base = OTHER; note = 2'-O-methoxyethyl modified nucleotide with phosphorothioate linkage
  modified_base 5: mod_base = OTHER; note = Nucleotide with phosphorothioate linkage
  modified_base 6: mod_base = OTHER; note = 5-methylcytosine with phosphorothioate linkage
  modified_base 7: mod_base = OTHER; note = Nucleotide with phosphorothioate linkage
  modified_base 8: mod_base = OTHER; note = Nucleotide with phosphorothioate linkage
  modified_base 9: mod_base = OTHER; note = Nucleotide with phosphorothioate linkage
  modified_base 10: mod_base = OTHER; note = 5-methylcytosine with phosphorothioate linkage
  modified_base 11: mod_base = OTHER; note = Nucleotide with phosphorothioate linkage
  modified_base 12: mod_base = OTHER; note = Nucleotide with phosphorothioate linkage
  modified_base 13: mod_base = OTHER; note = 5-methylcytosine with phosphorothioate linkage
  modified_base 14: mod_base = OTHER; note = Nucleotide with phosphorothioate linkage
  modified_base 15: mod_base = OTHER; note = Nucleotide with phosphorothioate linkage
  modified_base 16: mod_base = OTHER; note = 2'-O-methoxyethyl modified 5-methylcytosine
  modified_base 17: mod_base = OTHER; note = 2'-O-methoxyethyl modified 5-methylcytosine
  modified_base 18: mod_base = OTHER; note = 2'-O-methoxyethyl modified thymine
  modified_base 19: mod_base = OTHER; note = 2'-O-methoxyethyl modified thymine with phosphorothioate linkage
  modified_base 20: mod_base = OTHER; note = 2'-O-methoxyethyl modified nucleotide
  misc_feature 1..4: note = RNA
  misc_feature 5..15: note = DNA
  misc_feature 16..20: note = RNA
ccagtctagctgctaccttg

SEQ ID NO: 435 - DNA, 20 bp, synthetic construct
  source 1..20: mol_type = other DNA
  modified_base 1: mod_base = OTHER; note = 2'-O-methoxyethyl modified thymine with phosphorothioate linkage
  modified_base 2: mod_base = OTHER; note = 2'-O-methoxyethyl modified 5-methylcytosine
  modified_base 3: mod_base = OTHER; note = 2'-O-methoxyethyl modified nucleotide
  modified_base 4: mod_base = OTHER; note = 2'-O-methoxyethyl modified 5-methylcytosine with phosphorothioate linkage
  modified_base 5: mod_base = OTHER; note = Nucleotide with phosphorothioate linkage
  modified_base 6: mod_base = OTHER; note = 5-methylcytosine with phosphorothioate linkage
  modified_base 7: mod_base = OTHER; note = 5-methylcytosine with phosphorothioate linkage
  modified_base 8: mod_base = OTHER; note = Nucleotide with phosphorothioate linkage
  modified_base 9: mod_base = OTHER; note = Nucleotide with phosphorothioate linkage
  modified_base 10: mod_base = OTHER; note = Nucleotide with phosphorothioate linkage
  modified_base 11: mod_base = OTHER; note = 5-methylcytosine with phosphorothioate linkage
  modified_base 12: mod_base = OTHER; note = Nucleotide with phosphorothioate linkage
  modified_base 13: mod_base = OTHER; note = Nucleotide with phosphorothioate linkage
  modified_base 14: mod_base = OTHER; note = Nucleotide with phosphorothioate linkage
  modified_base 15: mod_base = OTHER; note = 5-methylcytosine with phosphorothioate linkage
  modified_base 16: mod_base = OTHER; note = 2'-O-methoxyethyl modified thymine
  modified_base 17: mod_base = OTHER; note = 2'-O-methoxyethyl modified nucleotide
  modified_base 18: mod_base = OTHER; note = 2'-O-methoxyethyl modified 5-methylcytosine
  modified_base 19: mod_base = OTHER; note = 2'-O-methoxyethyl modified thymine with phosphorothioate linkage
  modified_base 20: mod_base = OTHER; note = 2'-O-methoxyethyl modified nucleotide
  misc_feature 1..4: note = RNA
  misc_feature 5..15: note = DNA
  misc_feature 16..20: note = RNA
tcacaccagtctagctgcta

SEQ ID NO: 436 - DNA, 20 bp, synthetic construct
  source 1..20: mol_type = other DNA
  modified_base 1: mod_base = OTHER; note = 2'-O-methoxyethyl modified nucleotide with phosphorothioate linkage
  modified_base 2: mod_base = OTHER; note = 2'-O-methoxyethyl modified thymine
  modified_base 3: mod_base = OTHER; note = 2'-O-methoxyethyl modified 5-methylcytosine
  modified_base 4: mod_base = OTHER; note = 2'-O-methoxyethyl modified nucleotide with phosphorothioate linkage
  modified_base 5: mod_base = OTHER; note = 5-methylcytosine with phosphorothioate linkage
  modified_base 6: mod_base = OTHER; note = Nucleotide with phosphorothioate linkage
  modified_base 7: mod_base = OTHER; note = 5-methylcytosine with phosphorothioate linkage
  modified_base 8: mod_base = OTHER; note = 5-methylcytosine with phosphorothioate linkage
  modified_base 9: mod_base = OTHER; note = Nucleotide with phosphorothioate linkage
  modified_base 10: mod_base = OTHER; note = Nucleotide with phosphorothioate linkage
  modified_base 11: mod_base = OTHER; note = Nucleotide with phosphorothioate linkage
  modified_base 12: mod_base = OTHER; note = 5-methylcytosine with phosphorothioate linkage
  modified_base 13: mod_base = OTHER; note = Nucleotide with phosphorothioate linkage
  modified_base 14: mod_base = OTHER; note = Nucleotide with phosphorothioate linkage
  modified_base 15: mod_base = OTHER; note = Nucleotide with phosphorothioate linkage
  modified_base 16: mod_base = OTHER; note = 2'-O-methoxyethyl modified 5-methylcytosine
  modified_base 17: mod_base = OTHER; note = 2'-O-methoxyethyl modified thymine
  modified_base 18: mod_base = OTHER; note = 2'-O-methoxyethyl modified nucleotide
  modified_base 19: mod_base = OTHER; note = 2'-O-methoxyethyl modified 5-methylcytosine with phosphorothioate linkage
  modified_base 20: mod_base = OTHER; note = 2'-O-methoxyethyl modified thymine
  misc_feature 1..4: note = RNA
  misc_feature 5..15: note = DNA
  misc_feature 16..20: note = RNA
gtcacaccagtctagctgct

SEQ ID NO: 437 - DNA, 20 bp, synthetic construct
  source 1..20: mol_type = other DNA
  modified_base 1: mod_base = OTHER; note = 2'-O-methoxyethyl modified nucleotide with phosphorothioate linkage
  modified_base 2: mod_base = OTHER; note = 2'-O-methoxyethyl modified nucleotide
  modified_base 3: mod_base = OTHER; note = 2'-O-methoxyethyl modified nucleotide
  modified_base 4: mod_base = OTHER; note = 2'-O-methoxyethyl modified thymine with phosphorothioate linkage
  modified_base 5: mod_base = OTHER; note = Nucleotide with phosphorothioate linkage
  modified_base 6: mod_base = OTHER; note = Nucleotide with phosphorothioate linkage
  modified_base 7: mod_base = OTHER; note = Nucleotide with phosphorothioate linkage
  modified_base 8: mod_base = OTHER; note = 5-methylcytosine with phosphorothioate linkage
  modified_base 9: mod_base = OTHER; note = Nucleotide with phosphorothioate linkage
  modified_base 10: mod_base = OTHER; note = 5-methylcytosine with phosphorothioate linkage
  modified_base 11: mod_base = OTHER; note = Nucleotide with phosphorothioate linkage
  modified_base 12: mod_base = OTHER; note = 5-methylcytosine with phosphorothioate linkage
  modified_base 13: mod_base = OTHER; note = 5-methylcytosine with phosphorothioate linkage
  modified_base 14: mod_base = OTHER; note = Nucleotide with phosphorothioate linkage
  modified_base 15: mod_base = OTHER; note = Nucleotide with phosphorothioate linkage
  modified_base 16: mod_base = OTHER; note = 2'-O-methoxyethyl modified thymine
  modified_base 17: mod_base = OTHER; note = 2'-O-methoxyethyl modified 5-methylcytosine
  modified_base 18: mod_base = OTHER; note = 2'-O-methoxyethyl modified thymine
  modified_base 19: mod_base = OTHER; note = 2'-O-methoxyethyl modified nucleotide with phosphorothioate linkage
  modified_base 20: mod_base = OTHER; note = 2'-O-methoxyethyl modified nucleotide
  misc_feature 1..4: note = RNA
  misc_feature 5..15: note = DNA
  misc_feature 16..20: note = RNA
aggttgtcacaccagtctag

SEQ ID NO: 438 - DNA, 20 bp, synthetic construct
  source 1..20: mol_type = other DNA
  modified_base 1: mod_base = OTHER; note = 2'-O-methoxyethyl modified 5-methylcytosine with phosphorothioate linkage
  modified_base 2: mod_base = OTHER; note = 2'-O-methoxyethyl modified nucleotide
  modified_base 3: mod_base = OTHER; note = 2'-O-methoxyethyl modified nucleotide
  modified_base 4: mod_base = OTHER; note = 2'-O-methoxyethyl modified nucleotide with phosphorothioate linkage
  modified_base 5: mod_base = OTHER; note = Nucleotide with phosphorothioate linkage
  modified_base 6: mod_base = OTHER; note = Nucleotide with phosphorothioate linkage
  modified_base 7: mod_base = OTHER; note = Nucleotide with phosphorothioate linkage
  modified_base 8: mod_base = OTHER; note = Nucleotide with phosphorothioate linkage
  modified_base 9: mod_base = OTHER; note = 5-methylcytosine with phosphorothioate linkage
  modified_base 10: mod_base = OTHER; note = Nucleotide with phosphorothioate linkage
  modified_base 11: mod_base = OTHER; note = 5-methylcytosine with phosphorothioate linkage
  modified_base 12: mod_base = OTHER; note = Nucleotide with phosphorothioate linkage
  modified_base 13: mod_base = OTHER; note = 5-methylcytosine with phosphorothioate linkage
  modified_base 14: mod_base = OTHER; note = 5-methylcytosine with phosphorothioate linkage
  modified_base 15: mod_base = OTHER; note = Nucleotide with phosphorothioate linkage
  modified_base 16: mod_base = OTHER; note = 2'-O-methoxyethyl modified nucleotide
  modified_base 17: mod_base = OTHER; note = 2'-O-methoxyethyl modified thymine
  modified_base 18: mod_base = OTHER; note = 2'-O-methoxyethyl modified 5-methylcytosine
  modified_base 19: mod_base = OTHER; note = 2'-O-methoxyethyl modified thymine with phosphorothioate linkage
  modified_base 20: mod_base = OTHER; note = 2'-O-methoxyethyl modified nucleotide
  misc_feature 1..4: note = RNA
  misc_feature 5..15: note = DNA
  misc_feature 16..20: note = RNA
caggttgtcacaccagtcta

SEQ ID NO: 439 - DNA, 20 bp, synthetic construct
  source 1..20: mol_type = other DNA
  modified_base 1: mod_base = OTHER; note = 2'-O-methoxyethyl modified nucleotide with phosphorothioate linkage
  modified_base 2: mod_base = OTHER; note = 2'-O-methoxyethyl modified 5-methylcytosine
  modified_base 3: mod_base = OTHER; note = 2'-O-methoxyethyl modified nucleotide
  modified_base 4: mod_base = OTHER; note = 2'-O-methoxyethyl modified nucleotide with phosphorothioate linkage
  modified_base 5: mod_base = OTHER; note = Nucleotide with phosphorothioate linkage
  modified_base 6: mod_base = OTHER; note = Nucleotide with phosphorothioate linkage
  modified_base 7: mod_base = OTHER; note = Nucleotide with phosphorothioate linkage
  modified_base 8: mod_base = OTHER; note = Nucleotide with phosphorothioate linkage
  modified_base 9: mod_base = OTHER; note = Nucleotide with phosphorothioate linkage
  modified_base 10: mod_base = OTHER; note = 5-methylcytosine with phosphorothioate linkage
  modified_base 11: mod_base = OTHER; note = Nucleotide with phosphorothioate linkage
  modified_base 12: mod_base = OTHER; note = 5-methylcytosine with phosphorothioate linkage
  modified_base 13: mod_base = OTHER; note = Nucleotide with phosphorothioate linkage
  modified_base 14: mod_base = OTHER; note = 5-methylcytosine with phosphorothioate linkage
  modified_base 15: mod_base = OTHER; note = 5-methylcytosine with phosphorothioate linkage
  modified_base 16: mod_base = OTHER; note = 2'-O-methoxyethyl modified nucleotide
  modified_base 17: mod_base = OTHER; note = 2'-O-methoxyethyl modified nucleotide
  modified_base 18: mod_base = OTHER; note = 2'-O-methoxyethyl modified thymine
  modified_base 19: mod_base = OTHER; note = 2'-O-methoxyethyl modified 5-methylcytosine with phosphorothioate linkage
  modified_base 20: mod_base = OTHER; note = 2'-O-methoxyethyl modified thymine
  misc_feature 1..4: note = RNA
  misc_feature 5..15: note = DNA
  misc_feature 16..20: note = RNA
acaggttgtcacaccagtct

SEQ ID NO: 440 - DNA, 20 bp, synthetic construct
  source 1..20: mol_type = other DNA
  modified_base 1: mod_base = OTHER; note = 2'-O-methoxyethyl modified nucleotide with phosphorothioate linkage
  modified_base 2: mod_base = OTHER; note = 2'-O-methoxyethyl modified nucleotide
  modified_base 3: mod_base = OTHER; note = 2'-O-methoxyethyl modified thymine
  modified_base 4: mod_base = OTHER; note = 2'-O-methoxyethyl modified nucleotide with phosphorothioate linkage
  modified_base 5: mod_base = OTHER; note = Nucleotide with phosphorothioate linkage
  modified_base 6: mod_base = OTHER; note = Nucleotide with phosphorothioate linkage
  modified_base 7: mod_base = OTHER; note = 5-methylcytosine with phosphorothioate linkage
  modified_base 8: mod_base = OTHER; note = Nucleotide with phosphorothioate linkage
  modified_base 9: mod_base = OTHER; note = 5-methylcytosine with phosphorothioate linkage
  modified_base 10: mod_base = OTHER; note = Nucleotide with phosphorothioate linkage
  modified_base 11: mod_base = OTHER; note = Nucleotide with phosphorothioate linkage
  modified_base 12: mod_base = OTHER; note = 5-methylcytosine with phosphorothioate linkage
  modified_base 13: mod_base = OTHER; note = Nucleotide with phosphorothioate linkage
  modified_base 14: mod_base = OTHER; note = Nucleotide with phosphorothioate linkage
  modified_base 15: mod_base = OTHER; note = Nucleotide with phosphorothioate linkage
  modified_base 16: mod_base = OTHER; note = 2'-O-methoxyethyl modified nucleotide
  modified_base 17: mod_base = OTHER; note = 2'-O-methoxyethyl modified nucleotide
  modified_base 18: mod_base = OTHER; note = 2'-O-methoxyethyl modified nucleotide
  modified_base 19: mod_base = OTHER; note = 2'-O-methoxyethyl modified thymine with phosphorothioate linkage
  modified_base 20: mod_base = OTHER; note = 2'-O-methoxyethyl modified 5-methylcytosine
  misc_feature 1..4: note = RNA
  misc_feature 5..15: note = DNA
  misc_feature 16..20: note = RNA
ggtgatcacagctttgagtc

SEQ ID NO: 441 - DNA, 20 bp, synthetic construct
  source 1..20: mol_type = other DNA
  modified_base 1: mod_base = OTHER; note = 2'-O-methoxyethyl modified nucleotide with phosphorothioate linkage
  modified_base 2: mod_base = OTHER; note = 2'-O-methoxyethyl modified nucleotide
  modified_base 3: mod_base = OTHER; note = 2'-O-methoxyethyl modified 5-methylcytosine
  modified_base 4: mod_base = OTHER; note = 2'-O-methoxyethyl modified 5-methylcytosine with phosphorothioate linkage
  modified_base 5: mod_base = OTHER; note = Nucleotide with phosphorothioate linkage
  modified_base 6: mod_base = OTHER; note = Nucleotide with phosphorothioate linkage
  modified_base 7: mod_base = OTHER; note = Nucleotide with phosphorothioate linkage
  modified_base 8: mod_base = OTHER; note = 5-methylcytosine with phosphorothioate linkage
  modified_base 9: mod_base = OTHER; note = Nucleotide with phosphorothioate linkage
  modified_base 10: mod_base = OTHER; note = Nucleotide with phosphorothioate linkage
  modified_base 11: mod_base = OTHER; note = Nucleotide with phosphorothioate linkage
  modified_base 12: mod_base = OTHER; note = Nucleotide with phosphorothioate linkage
  modified_base 13: mod_base = OTHER; note = Nucleotide with phosphorothioate linkage
  modified_base 14: mod_base = OTHER; note = 5-methylcytosine with phosphorothioate linkage
  modified_base 15: mod_base = OTHER; note = Nucleotide with phosphorothioate linkage
  modified_base 16: mod_base = OTHER; note = 2'-O-methoxyethyl modified thymine
  modified_base 17: mod_base = OTHER; note = 2'-O-methoxyethyl modified 5-methylcytosine
  modified_base 18: mod_base = OTHER; note = 2'-O-methoxyethyl modified nucleotide
  modified_base 19: mod_base = OTHER; note = 2'-O-methoxyethyl modified nucleotide with phosphorothioate linkage
  modified_base 20: mod_base = OTHER; note = 2'-O-methoxyethyl modified nucleotide
  misc_feature 1..4: note = RNA
  misc_feature 5..15: note = DNA
  misc_feature 16..20: note = RNA
ggccattcggtgacatcagg

SEQ ID NO: 442 - DNA, 20 bp, synthetic construct
  source 1..20: mol_type = other DNA
  modified_base 1: mod_base = OTHER; note = 2'-O-methoxyethyl modified thymine with phosphorothioate linkage
  modified_base 2: mod_base = OTHER; note = 2'-O-methoxyethyl modified nucleotide
  modified_base 3: mod_base = OTHER; note = 2'-O-methoxyethyl modified nucleotide
  modified_base 4: mod_base = OTHER; note = 2'-O-methoxyethyl modified 5-methylcytosine with phosphorothioate linkage
  modified_base 5: mod_base = OTHER; note = 5-methylcytosine with phosphorothioate linkage
  modified_base 6: mod_base = OTHER; note = Nucleotide with phosphorothioate linkage
  modified_base 7: mod_base = OTHER; note = Nucleotide with phosphorothioate linkage
  modified_base 8: mod_base = OTHER; note = Nucleotide with phosphorothioate linkage
  modified_base 9: mod_base = OTHER; note = 5-methylcytosine with phosphorothioate linkage
  modified_base 10: mod_base = OTHER; note = Nucleotide with phosphorothioate linkage
  modified_base 11: mod_base = OTHER; note = Nucleotide with phosphorothioate linkage
  modified_base 12: mod_base = OTHER; note = Nucleotide with phosphorothioate linkage
  modified_base 13: mod_base = OTHER; note = Nucleotide with phosphorothioate linkage
  modified_base 14: mod_base = OTHER; note = Nucleotide with phosphorothioate linkage
  modified_base 15: mod_base = OTHER; note = 5-methylcytosine with phosphorothioate linkage
  modified_base 16: mod_base = OTHER; note = 2'-O-methoxyethyl modified nucleotide
  modified_base 17: mod_base = OTHER; note = 2'-O-methoxyethyl modified thymine
  modified_base 18: mod_base = OTHER; note = 2'-O-methoxyethyl modified 5-methylcytosine
  modified_base 19: mod_base = OTHER; note = 2'-O-methoxyethyl modified nucleotide with phosphorothioate linkage
  modified_base 20: mod_base = OTHER; note = 2'-O-methoxyethyl modified nucleotide
  misc_feature 1..4: note = RNA
  misc_feature 5..15: note = DNA
  misc_feature 16..20: note = RNA
tggccattcggtgacatcag

SEQ ID NO: 443 - DNA, 20 bp, synthetic construct
  source 1..20: mol_type = other DNA
  modified_base 1: mod_base = OTHER; note = 2'-O-methoxyethyl modified nucleotide with phosphorothioate linkage
  modified_base 2: mod_base = OTHER; note = 2'-O-methoxyethyl modified thymine
  modified_base 3: mod_base = OTHER; note = 2'-O-methoxyethyl modified nucleotide
  modified_base 4: mod_base = OTHER; note = 2'-O-methoxyethyl modified nucleotide with phosphorothioate linkage
  modified_base 5: mod_base = OTHER; note = 5-methylcytosine with phosphorothioate linkage
  modified_base 6: mod_base = OTHER; note = 5-methylcytosine with phosphorothioate linkage
  modified_base 7: mod_base = OTHER; note = Nucleotide with phosphorothioate linkage
  modified_base 8: mod_base = OTHER; note = Nucleotide with phosphorothioate linkage
  modified_base 9: mod_base = OTHER; note = Nucleotide with phosphorothioate linkage
  modified_base 10: mod_base = OTHER; note = 5-methylcytosine with phosphorothioate linkage
  modified_base 11: mod_base = OTHER; note = Nucleotide with phosphorothioate linkage
  modified_base 12: mod_base = OTHER; note = Nucleotide with phosphorothioate linkage
  modified_base 13: mod_base = OTHER; note = Nucleotide with phosphorothioate linkage
  modified_base 14: mod_base = OTHER; note = Nucleotide with phosphorothioate linkage
  modified_base 15: mod_base = OTHER; note = Nucleotide with phosphorothioate linkage
  modified_base 16: mod_base = OTHER; note = 2'-O-methoxyethyl modified 5-methylcytosine
  modified_base 17: mod_base = OTHER; note = 2'-O-methoxyethyl modified nucleotide
  modified_base 18: mod_base = OTHER; note = 2'-O-methoxyethyl modified thymine
  modified_base 19: mod_base = OTHER; note = 2'-O-methoxyethyl modified 5-methylcytosine with phosphorothioate linkage
  modified_base 20: mod_base = OTHER; note = 2'-O-methoxyethyl modified nucleotide
  misc_feature 1..4: note = RNA
  misc_feature 5..15: note = DNA
  misc_feature 16..20: note = RNA
gtggccattcggtgacatca

SEQ ID NO: 444 - DNA, 20 bp, synthetic construct
  source 1..20: mol_type = other DNA
  modified_base 1: mod_base = OTHER; note = 2'-O-methoxyethyl modified thymine with phosphorothioate linkage
  modified_base 2: mod_base = OTHER; note = 2'-O-methoxyethyl modified nucleotide
  modified_base 3: mod_base = OTHER; note = 2'-O-methoxyethyl modified thymine
  modified_base 4: mod_base = OTHER; note = 2'-O-methoxyethyl modified nucleotide with phosphorothioate linkage
  modified_base 5: mod_base = OTHER; note = Nucleotide with phosphorothioate linkage
  modified_base 6: mod_base = OTHER; note = 5-methylcytosine with phosphorothioate linkage
  modified_base 7: mod_base = OTHER; note = 5-methylcytosine with phosphorothioate linkage
  modified_base 8: mod_base = OTHER; note = Nucleotide with phosphorothioate linkage
  modified_base 9: mod_base = OTHER; note = Nucleotide with phosphorothioate linkage
  modified_base 10: mod_base = OTHER; note = Nucleotide with phosphorothioate linkage
  modified_base 11: mod_base = OTHER; note = 5-methylcytosine with phosphorothioate linkage
  modified_base 12: mod_base = OTHER; note = Nucleotide with phosphorothioate linkage
  modified_base 13: mod_base = OTHER; note = Nucleotide with phosphorothioate linkage
  modified_base 14: mod_base = OTHER; note = Nucleotide with phosphorothioate linkage
  modified_base 15: mod_base = OTHER; note = Nucleotide with phosphorothioate linkage
  modified_base 16: mod_base = OTHER; note = 2'-O-methoxyethyl modified nucleotide
  modified_base 17: mod_base = OTHER; note = 2'-O-methoxyethyl modified 5-methylcytosine
  modified_base 18: mod_base = OTHER; note = 2'-O-methoxyethyl modified nucleotide
  modified_base 19: mod_base = OTHER; note = 2'-O-methoxyethyl modified thymine with phosphorothioate linkage
  modified_base 20: mod_base = OTHER; note = 2'-O-methoxyethyl modified 5-methylcytosine
  misc_feature 1..4: note = RNA
  misc_feature 5..15: note = DNA
  misc_feature 16..20: note = RNA
tgtggccattcggtgacatc

SEQ ID NO: 445 - DNA, 20 bp, synthetic construct
  source 1..20: mol_type = other DNA
  modified_base 1: mod_base = OTHER; note = 2'-O-methoxyethyl modified nucleotide with phosphorothioate linkage
  modified_base 2: mod_base = OTHER; note = 2'-O-methoxyethyl modified 5-methylcytosine
  modified_base 3: mod_base = OTHER; note = 2'-O-methoxyethyl modified thymine
  modified_base 4: mod_base = OTHER; note = 2'-O-methoxyethyl modified nucleotide with phosphorothioate linkage
  modified_base 5: mod_base = OTHER; note = Nucleotide with phosphorothioate linkage
  modified_base 6: mod_base = OTHER; note = Nucleotide with phosphorothioate linkage
  modified_base 7: mod_base = OTHER; note = Nucleotide with phosphorothioate linkage
  modified_base 8: mod_base = OTHER; note = 5-methylcytosine with phosphorothioate linkage
  modified_base 9: mod_base = OTHER; note = 5-methylcytosine with phosphorothioate linkage
  modified_base 10: mod_base = OTHER; note = Nucleotide with phosphorothioate linkage
  modified_base 11: mod_base = OTHER; note = Nucleotide with phosphorothioate linkage
  modified_base 12: mod_base = OTHER; note = Nucleotide with phosphorothioate linkage
  modified_base 13: mod_base = OTHER; note = 5-methylcytosine with phosphorothioate linkage
  modified_base 14: mod_base = OTHER; note = Nucleotide with phosphorothioate linkage
  modified_base 15: mod_base = OTHER; note = Nucleotide with phosphorothioate linkage
  modified_base 16: mod_base = OTHER; note = 2'-O-methoxyethyl modified thymine
  modified_base 17: mod_base = OTHER; note = 2'-O-methoxyethyl modified nucleotide
  modified_base 18: mod_base = OTHER; note = 2'-O-methoxyethyl modified nucleotide
  modified_base 19: mod_base = OTHER; note = 2'-O-methoxyethyl modified 5-methylcytosine with phosphorothioate linkage
  modified_base 20: mod_base = OTHER; note = 2'-O-methoxyethyl modified nucleotide
  misc_feature 1..4: note = RNA
  misc_feature 5..15: note = DNA
  misc_feature 16..20: note = RNA
gctgtggccattcggtgaca

SEQ ID NO: 446 - DNA, 20 bp, synthetic construct
  source 1..20: mol_type = other DNA
  modified_base 1: mod_base = OTHER; note = 2'-O-methoxyethyl modified nucleotide with phosphorothioate linkage
  modified_base 2: mod_base = OTHER; note = 2'-O-methoxyethyl modified nucleotide
  modified_base 3: mod_base = OTHER; note = 2'-O-methoxyethyl modified 5-methylcytosine
  modified_base 4: mod_base = OTHER; note = 2'-O-methoxyethyl modified thymine with phosphorothioate linkage
  modified_base 5: mod_base = OTHER; note = Nucleotide with phosphorothioate linkage
  modified_base 6: mod_base = OTHER; note = Nucleotide with phosphorothioate linkage
  modified_base 7: mod_base = OTHER; note = Nucleotide with phosphorothioate linkage
  modified_base 8: mod_base = OTHER; note = Nucleotide with phosphorothioate linkage
  modified_base 9: mod_base = OTHER; note = 5-methylcytosine with phosphorothioate linkage
  modified_base 10: mod_base = OTHER; note = 5-methylcytosine with phosphorothioate linkage
  modified_base 11: mod_base = OTHER; note = Nucleotide with phosphorothioate linkage
  modified_base 12: mod_base = OTHER; note = Nucleotide with phosphorothioate linkage
  modified_base 13: mod_base = OTHER; note = Nucleotide with phosphorothioate linkage
  modified_base 14: mod_base = OTHER; note = 5-methylcytosine with phosphorothioate linkage
  modified_base 15: mod_base = OTHER; note = Nucleotide with phosphorothioate linkage
  modified_base 16: mod_base = OTHER; note = 2'-O-methoxyethyl modified nucleotide
  modified_base 17: mod_base = OTHER; note = 2'-O-methoxyethyl modified thymine
  modified_base 18: mod_base = OTHER; note = 2'-O-methoxyethyl modified nucleotide
  modified_base 19: mod_base = OTHER; note = 2'-O-methoxyethyl modified nucleotide with phosphorothioate linkage
  modified_base 20: mod_base = OTHER; note = 2'-O-methoxyethyl modified 5-methylcytosine
  misc_feature 1..4: note = RNA
  misc_feature 5..15: note = DNA
  misc_feature 16..20: note = RNA
agctgtggccattcggtgac

SEQ ID NO: 447 - DNA, 20 bp, synthetic construct
  source 1..20: mol_type = other DNA
  modified_base 1: mod_base = OTHER; note = 2'-O-methoxyethyl modified nucleotide with phosphorothioate linkage
  modified_base 2: mod_base = OTHER; note = 2'-O-methoxyethyl modified nucleotide
  modified_base 3: mod_base = OTHER; note = 2'-O-methoxyethyl modified nucleotide
  modified_base 4: mod_base = OTHER; note = 2'-O-methoxyethyl modified 5-methylcytosine with phosphorothioate linkage
  modified_base 5: mod_base = OTHER; note = Nucleotide with phosphorothioate linkage
  modified_base 6: mod_base = OTHER; note = Nucleotide with phosphorothioate linkage
  modified_base 7: mod_base = OTHER; note = Nucleotide with phosphorothioate linkage
  modified_base 8: mod_base = OTHER; note = Nucleotide with phosphorothioate linkage
  modified_base 9: mod_base = OTHER; note = Nucleotide with phosphorothioate linkage
  modified_base 10: mod_base = OTHER; note = 5-methylcytosine with phosphorothioate linkage
  modified_base 11: mod_base = OTHER; note = 5-methylcytosine with phosphorothioate linkage
  modified_base 12: mod_base = OTHER; note = Nucleotide with phosphorothioate linkage
  modified_base 13: mod_base = OTHER; note = Nucleotide with phosphorothioate linkage
  modified_base 14: mod_base = OTHER; note = Nucleotide with phosphorothioate linkage
  modified_base 15: mod_base = OTHER; note = 5-methylcytosine with phosphorothioate linkage
  modified_base 16: mod_base = OTHER; note = 2'-O-methoxyethyl modified nucleotide
  modified_base 17: mod_base = OTHER; note = 2'-O-methoxyethyl modified nucleotide
  modified_base 18: mod_base = OTHER; note = 2'-O-methoxyethyl modified thymine
  modified_base 19: mod_base = OTHER; note = 2'-O-methoxyethyl modified nucleotide with phosphorothioate linkage
  modified_base 20: mod_base = OTHER; note = 2'-O-methoxyethyl modified nucleotide
  misc_feature 1..4: note = RNA
  misc_feature 5..15: note = DNA
  misc_feature 16..20: note = RNA
aagctgtggccattcggtga

SEQ ID NO: 448 - DNA, 20 bp, synthetic construct
  source 1..20: mol_type = other DNA
  modified_base 1: mod_base = OTHER; note = 2'-O-methoxyethyl modified 5-methylcytosine with phosphorothioate linkage
  modified_base 2: mod_base = OTHER; note = 2'-O-methoxyethyl modified nucleotide
  modified_base 3: mod_base = OTHER; note = 2'-O-methoxyethyl modified nucleotide
  modified_base 4: mod_base = OTHER; note = 2'-O-methoxyethyl modified nucleotide with phosphorothioate linkage
  modified_base 5: mod_base = OTHER; note = 5-methylcytosine with phosphorothioate linkage
  modified_base 6: mod_base = OTHER; note = Nucleotide with phosphorothioate linkage
  modified_base 7: mod_base = OTHER; note = Nucleotide with phosphorothioate linkage
  modified_base 8: mod_base = OTHER; note = Nucleotide with phosphorothioate linkage
  modified_base 9: mod_base = OTHER; note = Nucleotide with phosphorothioate linkage
  modified_base 10: mod_base = OTHER; note = Nucleotide with phosphorothioate linkage
  modified_base 11: mod_base = OTHER; note = 5-methylcytosine with phosphorothioate linkage
  modified_base 12: mod_base = OTHER; note = 5-methylcytosine with phosphorothioate linkage
  modified_base 13: mod_base = OTHER; note = Nucleotide with phosphorothioate linkage
  modified_base 14: mod_base = OTHER; note = Nucleotide with phosphorothioate linkage
  modified_base 15: mod_base = OTHER; note = Nucleotide with phosphorothioate linkage
  modified_base 16: mod_base = OTHER; note = 2'-O-methoxyethyl modified 5-methylcytosine
  modified_base 17: mod_base = OTHER; note = 2'-O-methoxyethyl modified nucleotide
  modified_base 18: mod_base = OTHER; note = 2'-O-methoxyethyl modified nucleotide
  modified_base 19: mod_base = OTHER; note = 2'-O-methoxyethyl modified thymine with phosphorothioate linkage
  modified_base 20: mod_base = OTHER; note = 2'-O-methoxyethyl modified nucleotide
  misc_feature 1..4: note = RNA
  misc_feature 5..15: note = DNA
  misc_feature 16..20: note = RNA
caagctgtggccattcggtg

SEQ ID NO: 449 - DNA, 20 bp, synthetic construct
  source 1..20: mol_type = other DNA
  modified_base 1: mod_base = OTHER; note = 2'-O-methoxyethyl modified thymine with phosphorothioate linkage
  modified_base 2: mod_base = OTHER; note = 2'-O-methoxyethyl modified thymine
  modified_base 3: mod_base = OTHER; note = 2'-O-methoxyethyl modified nucleotide
  modified_base 4: mod_base = OTHER; note = 2'-O-methoxyethyl modified 5-methylcytosine with phosphorothioate linkage
  modified_base 5: mod_base = OTHER; note = Nucleotide with phosphorothioate linkage
  modified_base 6: mod_base = OTHER; note = Nucleotide with phosphorothioate linkage
  modified_base 7: mod_base = OTHER; note = Nucleotide with phosphorothioate linkage
  modified_base 8: mod_base = OTHER; note = 5-methylcytosine with phosphorothioate linkage
  modified_base 9: mod_base = OTHER; note = Nucleotide with phosphorothioate linkage
  modified_base 10: mod_base = OTHER; note = Nucleotide with phosphorothioate linkage
  modified_base 11: mod_base = OTHER; note = Nucleotide with phosphorothioate linkage
  modified_base 12: mod_base = OTHER; note = Nucleotide with phosphorothioate linkage
  modified_base 13: mod_base = OTHER; note = Nucleotide with phosphorothioate linkage
  modified_base 14: mod_base = OTHER; note = 5-methylcytosine with phosphorothioate linkage
  modified_base 15: mod_base = OTHER; note = 5-methylcytosine with phosphorothioate linkage
  modified_base 16: mod_base = OTHER; note = 2'-O-methoxyethyl modified nucleotide
  modified_base 17: mod_base = OTHER; note = 2'-O-methoxyethyl modified thymine
  modified_base 18: mod_base = OTHER; note = 2'-O-methoxyethyl modified thymine
  modified_base 19: mod_base = OTHER; note = 2'-O-methoxyethyl modified 5-methylcytosine with phosphorothioate linkage
  modified_base 20: mod_base = OTHER; note = 2'-O-methoxyethyl modified nucleotide
  misc_feature 1..4: note = RNA
  misc_feature 5..15: note = DNA
  misc_feature 16..20: note = RNA
ttacaagctgtggccattcg

SEQ ID NO: 450 - DNA, 20 bp, synthetic construct
  source 1..20: mol_type = other DNA
  modified_base 1: mod_base = OTHER; note = 2'-O-methoxyethyl modified 5-methylcytosine with phosphorothioate linkage
  modified_base 2: mod_base = OTHER; note = 2'-O-methoxyethyl modified nucleotide
  modified_base 3: mod_base = OTHER; note = 2'-O-methoxyethyl modified nucleotide
  modified_base 4: mod_base = OTHER; note = 2'-O-methoxyethyl modified nucleotide with phosphorothioate linkage
  modified_base 5: mod_base = OTHER; note = 5-methylcytosine with phosphorothioate linkage
  modified_base 6: mod_base = OTHER; note = Nucleotide with phosphorothioate linkage
  modified_base 7: mod_base = OTHER; note = Nucleotide with phosphorothioate linkage
  modified_base 8: mod_base = OTHER; note = Nucleotide with phosphorothioate linkage
  modified_base 9: mod_base = OTHER; note = Nucleotide with phosphorothioate linkage
  modified_base 10: mod_base = OTHER; note = Nucleotide with phosphorothioate linkage
  modified_base 11: mod_base = OTHER; note = Nucleotide with phosphorothioate linkage
  modified_base 12: mod_base = OTHER; note = Nucleotide with phosphorothioate linkage
  modified_base 13: mod_base = OTHER; note = 5-methylcytosine with phosphorothioate linkage
  modified_base 14: mod_base = OTHER; note = Nucleotide with phosphorothioate linkage
  modified_base 15: mod_base = OTHER; note = 5-methylcytosine with phosphorothioate linkage
  modified_base 16: mod_base = OTHER; note = 2'-O-methoxyethyl modified 5-methylcytosine
  modified_base 17: mod_base = OTHER; note = 2'-O-methoxyethyl modified thymine
  modified_base 18: mod_base = OTHER; note = 2'-O-methoxyethyl modified nucleotide
  modified_base 19: mod_base = OTHER; note = 2'-O-methoxyethyl modified nucleotide with phosphorothioate linkage
  modified_base 20: mod_base = OTHER; note = 2'-O-methoxyethyl modified thymine
  misc_feature 1..4: note = RNA
  misc_feature 5..15: note = DNA
  misc_feature 16..20: note = RNA
cagactgaggttctcctgat

SEQ ID NO: 451 - DNA, 20 bp, synthetic construct
  source 1..20: mol_type = other DNA
  modified_base 1: mod_base = OTHER; note = 2'-O-methoxyethyl modified thymine with phosphorothioate linkage
  modified_base 2: mod_base = OTHER; note = 2'-O-methoxyethyl modified 5-methylcytosine
  modified_base 3: mod_base = OTHER; note = 2'-O-methoxyethyl modified nucleotide
  modified_base 4: mod_base = OTHER; note = 2'-O-methoxyethyl modified nucleotide with phosphorothioate linkage
  modified_base 5: mod_base = OTHER; note = Nucleotide with phosphorothioate linkage
  modified_base 6: mod_base = OTHER; note = 5-methylcytosine with phosphorothioate linkage
  modified_base 7: mod_base = OTHER; note = Nucleotide with phosphorothioate linkage
  modified_base 8: mod_base = OTHER; note = Nucleotide with phosphorothioate linkage
  modified_base 9: mod_base = OTHER; note = Nucleotide with phosphorothioate linkage
  modified_base 10: mod_base = OTHER; note = Nucleotide with phosphorothioate linkage
  modified_base 11: mod_base = OTHER; note = Nucleotide with phosphorothioate linkage
  modified_base 12: mod_base = OTHER; note = Nucleotide with phosphorothioate linkage
  modified_base 13: mod_base = OTHER; note = Nucleotide with phosphorothioate linkage
  modified_base 14: mod_base = OTHER; note = 5-methylcytosine with phosphorothioate linkage
  modified_base 15: mod_base = OTHER; note = Nucleotide with phosphorothioate linkage
  modified_base 16: mod_base = OTHER; note = 2'-O-methoxyethyl modified 5-methylcytosine
  modified_base 17: mod_base = OTHER; note = 2'-O-methoxyethyl modified 5-methylcytosine
  modified_base 18: mod_base = OTHER; note = 2'-O-methoxyethyl modified thymine
  modified_base 19: mod_base = OTHER; note = 2'-O-methoxyethyl modified nucleotide with phosphorothioate linkage
  modified_base 20: mod_base = OTHER; note = 2'-O-methoxyethyl modified nucleotide
  misc_feature 1..4: note = RNA
  misc_feature 5..15: note = DNA
  misc_feature 16..20: note = RNA
tcagactgaggttctcctga

SEQ ID NO: 452 - DNA, 20 bp, synthetic construct
  source 1..20: mol_type = other DNA
  modified_base 1: mod_base = OTHER; note = 2'-O-methoxyethyl modified nucleotide with phosphorothioate linkage
  modified_base 2: mod_base = OTHER; note = 2'-O-methoxyethyl modified thymine
  modified_base 3: mod_base = OTHER; note = 2'-O-methoxyethyl modified 5-methylcytosine
  modified_base 4: mod_base = OTHER; note = 2'-O-methoxyethyl modified nucleotide with phosphorothioate linkage
  modified_base 5: mod_base = OTHER; note = Nucleotide with phosphorothioate linkage
  modified_base 6: mod_base = OTHER; note = Nucleotide with phosphorothioate linkage
  modified_base 7: mod_base = OTHER; note = 5-methylcytosine with phosphorothioate linkage
  modified_base 8: mod_base = OTHER; note = Nucleotide with phosphorothioate linkage
  modified_base 9: mod_base = OTHER; note = Nucleotide with phosphorothioate linkage
  modified_base 10: mod_base = OTHER; note = Nucleotide with phosphorothioate linkage
  modified_base 11: mod_base = OTHER; note = Nucleotide with phosphorothioate linkage
  modified_base 12: mod_base = OTHER; note = Nucleotide with phosphorothioate linkage
  modified_base 13: mod_base = OTHER; note = Nucleotide with phosphorothioate linkage
  modified_base 14: mod_base = OTHER; note = Nucleotide with phosphorothioate linkage
  modified_base 15: mod_base = OTHER; note = 5-methylcytosine with phosphorothioate linkage
  modified_base 16: mod_base = OTHER; note = 2'-O-methoxyethyl modified thymine
  modified_base 17: mod_base = OTHER; note = 2'-O-methoxyethyl modified 5-methylcytosine
  modified_base 18: mod_base = OTHER; note = 2'-O-methoxyethyl modified 5-methylcytosine
  modified_base 19: mod_base = OTHER; note = 2'-O-methoxyethyl modified thymine with phosphorothioate linkage
  modified_base 20: mod_base = OTHER; note = 2'-O-methoxyethyl modified nucleotide
  misc_feature 1..4: note = RNA
  misc_feature 5..15: note = DNA
  misc_feature 16..20: note = RNA
gtcagactgaggttctcctg

SEQ ID NO: 453 - DNA, 20 bp, synthetic construct
  source 1..20: mol_type = other DNA
  modified_base 1: mod_base = OTHER; note = 2'-O-methoxyethyl modified 5-methylcytosine with phosphorothioate linkage
  modified_base 2: mod_base = OTHER; note = 2'-O-methoxyethyl modified nucleotide
  modified_base 3: mod_base = OTHER; note = 2'-O-methoxyethyl modified thymine
  modified_base 4: mod_base = OTHER; note = 2'-O-methoxyethyl modified 5-methylcytosine with phosphorothioate linkage
  modified_base 5: mod_base = OTHER; note = Nucleotide with phosphorothioate linkage
  modified_base 6: mod_base = OTHER; note = Nucleotide with phosphorothioate linkage
  modified_base 7: mod_base = OTHER; note = Nucleotide with phosphorothioate linkage
  modified_base 8: mod_base = OTHER; note = 5-methylcytosine with phosphorothioate linkage
  modified_base 9: mod_base = OTHER; note = Nucleotide with phosphorothioate linkage
  modified_base 10: mod_base = OTHER; note = Nucleotide with phosphorothioate linkage
  modified_base 11: mod_base = OTHER; note = Nucleotide with phosphorothioate linkage
  modified_base 12: mod_base = OTHER; note = Nucleotide with phosphorothioate linkage
  modified_base 13: mod_base = OTHER; note = Nucleotide with phosphorothioate linkage
  modified_base 14: mod_base = OTHER; note = Nucleotide with phosphorothioate linkage
  modified_base 15: mod_base = OTHER; note = Nucleotide with phosphorothioate linkage
  modified_base 16: mod_base = OTHER; note = 2'-O-methoxyethyl modified 5-methylcytosine
  modified_base 17: mod_base = OTHER; note = 2'-O-methoxyethyl modified thymine
  modified_base 18: mod_base = OTHER; note = 2'-O-methoxyethyl modified 5-methylcytosine
  modified_base 19: mod_base = OTHER; note = 2'-O-methoxyethyl modified 5-methylcytosine with phosphorothioate linkage
  modified_base 20: mod_base = OTHER; note = 2'-O-methoxyethyl modified thymine
  misc_feature 1..4: note = RNA
  misc_feature 5..15: note = DNA
  misc_feature 16..20: note = RNA
cgtcagactgaggttctcct

SEQ ID NO: 454 - DNA, 20 bp, synthetic construct
  source 1..20: mol_type = other DNA
  modified_base 1: mod_base = OTHER; note = 2'-O-methoxyethyl modified nucleotide with phosphorothioate linkage
  modified_base 2: mod_base = OTHER; note = 2'-O-methoxyethyl modified thymine
  modified_base 3: mod_base = OTHER; note = 2'-O-methoxyethyl modified 5-methylcytosine
  modified_base 4: mod_base = OTHER; note = 2'-O-methoxyethyl modified nucleotide with phosphorothioate linkage
  modified_base 5: mod_base = OTHER; note = Nucleotide with phosphorothioate linkage
  modified_base 6: mod_base = OTHER; note = 5-methylcytosine with phosphorothioate linkage
  modified_base 7: mod_base = OTHER; note = Nucleotide with phosphorothioate linkage
  modified_base 8: mod_base = OTHER; note = Nucleotide with phosphorothioate linkage
  modified_base 9: mod_base = OTHER; note = Nucleotide with phosphorothioate linkage
  modified_base 10: mod_base = OTHER; note = 5-methylcytosine with phosphorothioate linkage
  modified_base 11: mod_base = OTHER; note = Nucleotide with phosphorothioate linkage
  modified_base 12: mod_base = OTHER; note = Nucleotide with phosphorothioate linkage
  modified_base 13: mod_base = OTHER; note = Nucleotide with phosphorothioate linkage
  modified_base 14: mod_base = OTHER; note = Nucleotide with phosphorothioate linkage
  modified_base 15: mod_base = OTHER; note = Nucleotide with phosphorothioate linkage
  modified_base 16: mod_base = OTHER; note = 2'-O-methoxyethyl modified thymine
  modified_base 17: mod_base = OTHER; note = 2'-O-methoxyethyl modified thymine
  modified_base 18: mod_base = OTHER; note = 2'-O-methoxyethyl modified 5-methylcytosine
  modified_base 19: mod_base = OTHER; note = 2'-O-methoxyethyl modified thymine with phosphorothioate linkage
  modified_base 20: mod_base = OTHER; note = 2'-O-methoxyethyl modified 5-methylcytosine
  misc_feature 1..4: note = RNA
  misc_feature 5..15: note = DNA
  misc_feature 16..20: note = RNA
gtcgtcagactgaggttctc

SEQ ID NO: 455 - DNA, 20 bp, synthetic construct
  source 1..20: mol_type = other DNA
  modified_base 1: mod_base = OTHER; note = 2'-O-methoxyethyl modified thymine with phosphorothioate linkage
  modified_base 2: mod_base = OTHER; note = 2'-O-methoxyethyl modified nucleotide
  modified_base 3: mod_base = OTHER; note = 2'-O-methoxyethyl modified thymine
  modified_base 4: mod_base = OTHER; note = 2'-O-methoxyethyl modified 5-methylcytosine with phosphorothioate linkage
  modified_base 5: mod_base = OTHER; note = Nucleotide with phosphorothioate linkage
  modified_base 6: mod_base = OTHER; note = Nucleotide with phosphorothioate linkage
  modified_base 7: mod_base = OTHER; note = 5-methylcytosine with phosphorothioate linkage
  modified_base 8: mod_base = OTHER; note = Nucleotide with phosphorothioate linkage
  modified_base 9: mod_base = OTHER; note = Nucleotide with phosphorothioate linkage
  modified_base 10: mod_base = OTHER; note = Nucleotide with phosphorothioate linkage
  modified_base 11: mod_base = OTHER; note = 5-methylcytosine with phosphorothioate linkage
  modified_base 12: mod_base = OTHER; note = Nucleotide with phosphorothioate linkage
  modified_base 13: mod_base = OTHER; note = Nucleotide with phosphorothioate linkage
  modified_base 14: mod_base = OTHER; note = Nucleotide with phosphorothioate linkage
  modified_base 15: mod_base = OTHER; note = Nucleotide with phosphorothioate linkage
  modified_base 16: mod_base = OTHER; note = 2'-O-methoxyethyl modified nucleotide
  modified_base 17: mod_base = OTHER; note = 2'-O-methoxyethyl modified thymine
  modified_base 18: mod_base = OTHER; note = 2'-O-methoxyethyl modified thymine
  modified_base 19: mod_base = OTHER; note = 2'-O-methoxyethyl modified 5-methylcytosine with phosphorothioate linkage
  modified_base 20: mod_base = OTHER; note = 2'-O-methoxyethyl modified thymine
  misc_feature 1..4: note = RNA
  misc_feature 5..15: note = DNA
  misc_feature 16..20: note = RNA
tgtcgtcagactgaggttct

SEQ ID NO: 456 - DNA, 20 bp, synthetic construct
  source 1..20: mol_type = other DNA
  modified_base 1: mod_base = OTHER; note = 2'-O-methoxyethyl modified nucleotide with phosphorothioate linkage
  modified_base 2: mod_base = OTHER; note = 2'-O-methoxyethyl modified thymine
  modified_base 3: mod_base = OTHER; note = 2'-O-methoxyethyl modified nucleotide
  modified_base 4: mod_base = OTHER; note = 2'-O-methoxyethyl modified thymine with phosphorothioate linkage
  modified_base 5: mod_base = OTHER; note = 5-methylcytosine with phosphorothioate linkage
  modified_base 6: mod_base = OTHER; note = Nucleotide with phosphorothioate linkage
  modified_base 7: mod_base = OTHER; note = Nucleotide with phosphorothioate linkage
  modified_base 8: mod_base = OTHER; note = 5-methylcytosine with phosphorothioate linkage
  modified_base 9: mod_base = OTHER; note = Nucleotide with phosphorothioate linkage
  modified_base 10: mod_base = OTHER; note = Nucleotide with phosphorothioate linkage
  modified_base 11: mod_base = OTHER; note = Nucleotide with phosphorothioate linkage
  modified_base 12: mod_base = OTHER; note = 5-methylcytosine with phosphorothioate linkage
  modified_base 13: mod_base = OTHER; note = Nucleotide with phosphorothioate linkage
  modified_base 14: mod_base = OTHER; note = Nucleotide with phosphorothioate linkage
  modified_base 15: mod_base = OTHER; note = Nucleotide with phosphorothioate linkage
  modified_base 16: mod_base = OTHER; note = 2'-O-methoxyethyl modified nucleotide
  modified_base 17: mod_base = OTHER; note = 2'-O-methoxyethyl modified nucleotide
  modified_base 18: mod_base = OTHER; note = 2'-O-methoxyethyl modified thymine
  modified_base 19: mod_base = OTHER; note = 2'-O-methoxyethyl modified thymine with phosphorothioate linkage
  modified_base 20: mod_base = OTHER; note = 2'-O-methoxyethyl modified 5-methylcytosine
  misc_feature 1..4: note = RNA
  misc_feature 5..15: note = DNA
  misc_feature 16..20: note = RNA
atgtcgtcagactgaggttc

SEQ ID NO: 457 - DNA, 20 bp, synthetic construct
  source 1..20: mol_type = other DNA
  modified_base 1: mod_base = OTHER; note = 2'-O-methoxyethyl modified 5-methylcytosine with phosphorothioate linkage
  modified_base 2: mod_base = OTHER; note = 2'-O-methoxyethyl modified nucleotide
  modified_base 3: mod_base = OTHER; note = 2'-O-methoxyethyl modified nucleotide
  modified_base 4: mod_base = OTHER; note = 2'-O-methoxyethyl modified thymine with phosphorothioate linkage
  modified_base 5: mod_base = OTHER; note = Nucleotide with phosphorothioate linkage
  modified_base 6: mod_base = OTHER; note = Nucleotide with phosphorothioate linkage
  modified_base 7: mod_base = OTHER; note = 5-methylcytosine with phosphorothioate linkage
  modified_base 8: mod_base = OTHER; note = Nucleotide with phosphorothioate linkage
  modified_base 9: mod_base = OTHER; note = Nucleotide with phosphorothioate linkage
  modified_base 10: mod_base = OTHER; note = 5-methylcytosine with phosphorothioate linkage
  modified_base 11: mod_base = OTHER; note = Nucleotide with phosphorothioate linkage
  modified_base 12: mod_base = OTHER; note = Nucleotide with phosphorothioate linkage
  modified_base 13: mod_base = OTHER; note = Nucleotide with phosphorothioate linkage
  modified_base 14: mod_base = OTHER; note = 5-methylcytosine with phosphorothioate linkage
  modified_base 15: mod_base = OTHER; note = Nucleotide with phosphorothioate linkage
  modified_base 16: mod_base = OTHER; note = 2'-O-methoxyethyl modified nucleotide
  modified_base 17: mod_base = OTHER; note = 2'-O-methoxyethyl modified nucleotide
  modified_base 18: mod_base = OTHER; note = 2'-O-methoxyethyl modified nucleotide
  modified_base 19: mod_base = OTHER; note = 2'-O-methoxyethyl modified nucleotide with phosphorothioate linkage
  modified_base 20: mod_base = OTHER; note = 2'-O-methoxyethyl modified thymine
  misc_feature 1..4: note = RNA
  misc_feature 5..15: note = DNA
  misc_feature 16..20: note = RNA
caatgtcgtcagactgaggt

SEQ ID NO: 458 - DNA, 20 bp, synthetic construct
  source 1..20: mol_type = other DNA
  modified_base 1: mod_base = OTHER; note = 2'-O-methoxyethyl modified nucleotide with phosphorothioate linkage
  modified_base 2: mod_base = OTHER; note = 2'-O-methoxyethyl modified 5-methylcytosine
  modified_base 3: mod_base = OTHER; note = 2'-O-methoxyethyl modified thymine
  modified_base 4: mod_base = OTHER; note = 2'-O-methoxyethyl modified thymine with phosphorothioate linkage
  modified_base 5: mod_base = OTHER; note = 5-methylcytosine with phosphorothioate linkage
  modified_base 6: mod_base = OTHER; note = Nucleotide with phosphorothioate linkage
  modified_base 7: mod_base = OTHER; note = Nucleotide with phosphorothioate linkage
  modified_base 8: mod_base = OTHER; note = Nucleotide with phosphorothioate linkage
  modified_base 9: mod_base = OTHER; note = Nucleotide with phosphorothioate linkage
  modified_base 10: mod_base = OTHER; note = Nucleotide with phosphorothioate linkage
  modified_base 11: mod_base = OTHER; note = 5-methylcytosine with phosphorothioate linkage
  modified_base 12: mod_base = OTHER; note = Nucleotide with phosphorothioate linkage
  modified_base 13: mod_base = OTHER; note = Nucleotide with phosphorothioate linkage
  modified_base 14: mod_base = OTHER; note = 5-methylcytosine with phosphorothioate linkage
  modified_base 15: mod_base = OTHER; note = Nucleotide with phosphorothioate linkage
  modified_base 16: mod_base = OTHER; note = 2'-O-methoxyethyl modified nucleotide
  modified_base 17: mod_base = OTHER; note = 2'-O-methoxyethyl modified nucleotide
  modified_base 18: mod_base = OTHER; note = 2'-O-methoxyethyl modified 5-methylcytosine
  modified_base 19: mod_base = OTHER; note = 2'-O-methoxyethyl modified thymine with phosphorothioate linkage
  modified_base 20: mod_base = OTHER; note = 2'-O-methoxyethyl modified nucleotide
  misc_feature 1..4: note = RNA
  misc_feature 5..15: note = DNA
  misc_feature 16..20: note = RNA
gcttcaatgtcgtcagactg

SEQ ID NO: 459 - DNA, 20 bp, synthetic construct
  source 1..20: mol_type = other DNA
  modified_base 1: mod_base = OTHER; note = 2'-O-methoxyethyl modified nucleotide with phosphorothioate linkage
  modified_base 2: mod_base = OTHER; note = 2'-O-methoxyethyl modified 5-methylcytosine
  modified_base 3: mod_base = OTHER; note = 2'-O-methoxyethyl modified thymine
  modified_base 4: mod_base = OTHER; note = 2'-O-methoxyethyl modified nucleotide with phosphorothioate linkage
  modified_base 5: mod_base = OTHER; note = Nucleotide with phosphorothioate linkage
  modified_base 6: mod_base = OTHER; note = 5-methylcytosine with phosphorothioate linkage
  modified_base 7: mod_base = OTHER; note = Nucleotide with phosphorothioate linkage
  modified_base 8: mod_base = OTHER; note = Nucleotide with phosphorothioate linkage
  modified_base 9: mod_base = OTHER; note = 5-methylcytosine with phosphorothioate linkage
  modified_base 10: mod_base = OTHER; note = Nucleotide with phosphorothioate linkage
  modified_base 11: mod_base = OTHER; note = Nucleotide with phosphorothioate linkage
  modified_base 12: mod_base = OTHER; note = Nucleotide with phosphorothioate linkage
  modified_base 13: mod_base = OTHER; note = Nucleotide with phosphorothioate linkage
  modified_base 14: mod_base = OTHER; note = Nucleotide with phosphorothioate linkage
  modified_base 15: mod_base = OTHER; note = 5-methylcytosine with phosphorothioate linkage
  modified_base 16: mod_base = OTHER; note = 2'-O-methoxyethyl modified nucleotide
  modified_base 17: mod_base = OTHER; note = 2'-O-methoxyethyl modified thymine
  modified_base 18: mod_base = OTHER; note = 2'-O-methoxyethyl modified 5-methylcytosine
  modified_base 19: mod_base = OTHER; note = 2'-O-methoxyethyl modified nucleotide with phosphorothioate linkage
  modified_base 20: mod_base = OTHER; note = 2'-O-methoxyethyl modified nucleotide
  misc_feature 1..4: note = RNA
  misc_feature 5..15: note = DNA
  misc_feature 16..20: note = RNA
gctagcttcaatgtcgtcag

SEQ ID NO: 460 - DNA, 20 bp, synthetic construct
  source 1..20: mol_type = other DNA
  modified_base 1: mod_base = OTHER; note = 2'-O-methoxyethyl modified nucleotide with phosphorothioate linkage
  modified_base 2: mod_base = OTHER; note = 2'-O-methoxyethyl modified nucleotide
  modified_base 3: mod_base = OTHER; note = 2'-O-methoxyethyl modified 5-methylcytosine
  modified_base 4: mod_base = OTHER; note = 2'-O-methoxyethyl modified thymine with phosphorothioate linkage
  modified_base 5: mod_base = OTHER; note = Nucleotide with phosphorothioate linkage
  modified_base 6: mod_base = OTHER; note = Nucleotide with phosphorothioate linkage
  modified_base 7: mod_base = OTHER; note = 5-methylcytosine with phosphorothioate linkage
  modified_base 8: mod_base = OTHER; note = Nucleotide with phosphorothioate linkage
  modified_base 9: mod_base = OTHER; note = Nucleotide with phosphorothioate linkage
  modified_base 10: mod_base = OTHER; note = 5-methylcytosine with phosphorothioate linkage
  modified_base 11: mod_base = OTHER; note = Nucleotide with phosphorothioate linkage
  modified_base 12: mod_base = OTHER; note = Nucleotide with phosphorothioate linkage
  modified_base 13: mod_base = OTHER; note = Nucleotide with phosphorothioate linkage
  modified_base 14: mod_base = OTHER; note = Nucleotide with phosphorothioate linkage
  modified_base 15: mod_base = OTHER; note = Nucleotide with phosphorothioate linkage
  modified_base 16: mod_base = OTHER; note = 2'-O-methoxyethyl modified 5-methylcytosine
  modified_base 17: mod_base = OTHER; note = 2'-O-methoxyethyl modified nucleotide
  modified_base 18: mod_base = OTHER; note = 2'-O-methoxyethyl modified thymine
  modified_base 19: mod_base = OTHER; note = 2'-O-methoxyethyl modified 5-methylcytosine with phosphorothioate linkage
  modified_base 20: mod_base = OTHER; note = 2'-O-methoxyethyl modified nucleotide
  misc_feature 1..4: note = RNA
  misc_feature 5..15: note = DNA
  misc_feature 16..20: note = RNA
ggctagcttcaatgtcgtca

SEQ ID NO: 461 - DNA, 20 bp, synthetic construct
  source 1..20: mol_type = other DNA
  modified_base 1: mod_base = OTHER; note = 2'-O-methoxyethyl modified 5-methylcytosine with phosphorothioate linkage
  modified_base 2: mod_base = OTHER; note = 2'-O-methoxyethyl modified nucleotide
  modified_base 3: mod_base = OTHER; note = 2'-O-methoxyethyl modified nucleotide
  modified_base 4: mod_base = OTHER; note = 2'-O-methoxyethyl modified 5-methylcytosine with phosphorothioate linkage
  modified_base 5: mod_base = OTHER; note = Nucleotide with phosphorothioate linkage
  modified_base 6: mod_base = OTHER; note = Nucleotide with phosphorothioate linkage
  modified_base 7: mod_base = OTHER; note = Nucleotide with phosphorothioate linkage
  modified_base 8: mod_base = OTHER; note = 5-methylcytosine with phosphorothioate linkage
  modified_base 9: mod_base = OTHER; note = Nucleotide with phosphorothioate linkage
  modified_base 10: mod_base = OTHER; note = Nucleotide with phosphorothioate linkage
  modified_base 11: mod_base = OTHER; note = 5-methylcytosine with phosphorothioate linkage
  modified_base 12: mod_base = OTHER; note = Nucleotide with phosphorothioate linkage
  modified_base 13: mod_base = OTHER; note = Nucleotide with phosphorothioate linkage
  modified_base 14: mod_base = OTHER; note = Nucleotide with phosphorothioate linkage
  modified_base 15: mod_base = OTHER; note = Nucleotide with phosphorothioate linkage
  modified_base 16: mod_base = OTHER; note = 2'-O-methoxyethyl modified thymine
  modified_base 17: mod_base = OTHER; note = 2'-O-methoxyethyl modified 5-methylcytosine
  modified_base 18: mod_base = OTHER; note = 2'-O-methoxyethyl modified nucleotide
  modified_base 19: mod_base = OTHER; note = 2'-O-methoxyethyl modified thymine with phosphorothioate linkage
  modified_base 20: mod_base = OTHER; note = 2'-O-methoxyethyl modified 5-methylcytosine
  misc_feature 1..4: note = RNA
  misc_feature 5..15: note = DNA
  misc_feature 16..20: note = RNA
cggctagcttcaatgtcgtc

SEQ ID NO: 462 - DNA, 20 bp, synthetic construct
  source 1..20: mol_type = other DNA
  modified_base 1: mod_base = OTHER; note = 2'-O-methoxyethyl modified thymine with phosphorothioate linkage
  modified_base 2: mod_base = OTHER; note = 2'-O-methoxyethyl modified 5-methylcytosine
  modified_base 3: mod_base = OTHER; note = 2'-O-methoxyethyl modified nucleotide
  modified_base 4: mod_base = OTHER; note = 2'-O-methoxyethyl modified nucleotide with phosphorothioate linkage
  modified_base 5: mod_base = OTHER; note = 5-methylcytosine with phosphorothioate linkage
  modified_base 6: mod_base = OTHER; note = Nucleotide with phosphorothioate linkage
  modified_base 7: mod_base = OTHER; note = Nucleotide with phosphorothioate linkage
  modified_base 8: mod_base = OTHER; note = Nucleotide with phosphorothioate linkage
  modified_base 9: mod_base = OTHER; note = 5-methylcytosine with phosphorothioate linkage
  modified_base 10: mod_base = OTHER; note = Nucleotide with phosphorothioate linkage
  modified_base 11: mod_base = OTHER; note = Nucleotide with phosphorothioate linkage
  modified_base 12: mod_base = OTHER; note = 5-methylcytosine with phosphorothioate linkage
  modified_base 13: mod_base = OTHER; note = Nucleotide with phosphorothioate linkage
  modified_base 14: mod_base = OTHER; note = Nucleotide with phosphorothioate linkage
  modified_base 15: mod_base = OTHER; note = Nucleotide with phosphorothioate linkage
  modified_base 16: mod_base = OTHER; note = 2'-O-methoxyethyl modified nucleotide
  modified_base 17: mod_base = OTHER; note = 2'-O-methoxyethyl modified thymine
  modified_base 18: mod_base = OTHER; note = 2'-O-methoxyethyl modified 5-methylcytosine
  modified_base 19: mod_base = OTHER; note = 2'-O-methoxyethyl modified nucleotide with phosphorothioate linkage
  modified_base 20: mod_base = OTHER; note = 2'-O-methoxyethyl modified thymine
  misc_feature 1..4: note = RNA
  misc_feature 5..15: note = DNA
  misc_feature 16..20: note = RNA
tcggctagcttcaatgtcgt

SEQ ID NO: 463 - DNA, 20 bp, synthetic construct
  source 1..20: mol_type = other DNA
  modified_base 1: mod_base = OTHER; note = 2'-O-methoxyethyl modified thymine with phosphorothioate linkage
  modified_base 2: mod_base = OTHER; note = 2'-O-methoxyethyl modified thymine
  modified_base 3: mod_base = OTHER; note = 2'-O-methoxyethyl modified 5-methylcytosine
  modified_base 4: mod_base = OTHER; note = 2'-O-methoxyethyl modified nucleotide with phosphorothioate linkage
  modified_base 5: mod_base = OTHER; note = Nucleotide with phosphorothioate linkage
  modified_base 6: mod_base = OTHER; note = 5-methylcytosine with phosphorothioate linkage
  modified_base 7: mod_base = OTHER; note = Nucleotide with phosphorothioate linkage
  modified_base 8: mod_base = OTHER; note = Nucleotide with phosphorothioate linkage
  modified_base 9: mod_base = OTHER; note = Nucleotide with phosphorothioate linkage
  modified_base 10: mod_base = OTHER; note = 5-methylcytosine with phosphorothioate linkage
  modified_base 11: mod_base = OTHER; note = Nucleotide with phosphorothioate linkage
  modified_base 12: mod_base = OTHER; note = Nucleotide with phosphorothioate linkage
  modified_base 13: mod_base = OTHER; note = 5-methylcytosine with phosphorothioate linkage
  modified_base 14: mod_base = OTHER; note = Nucleotide with phosphorothioate linkage
  modified_base 15: mod_base = OTHER; note = Nucleotide with phosphorothioate linkage
  modified_base 16: mod_base = OTHER; note = 2'-O-methoxyethyl modified thymine
  modified_base 17: mod_base = OTHER; note = 2'-O-methoxyethyl modified nucleotide
  modified_base 18: mod_base = OTHER; note = 2'-O-methoxyethyl modified thymine
  modified_base 19: mod_base = OTHER; note = 2'-O-methoxyethyl modified 5-methylcytosine with phosphorothioate linkage
  modified_base 20: mod_base = OTHER; note = 2'-O-methoxyethyl modified nucleotide
  misc_feature 1..4: note = RNA
  misc_feature 5..15: note = DNA
  misc_feature 16..20: note = RNA
ttcggctagcttcaatgtcg

SEQ ID NO: 464 - DNA, 20 bp, synthetic construct
  source 1..20: mol_type = other DNA
  modified_base 1: mod_base = OTHER; note = 2'-O-methoxyethyl modified thymine with phosphorothioate linkage
  modified_base 2: mod_base = OTHER; note = 2'-O-methoxyethyl modified nucleotide
  modified_base 3: mod_base = OTHER; note = 2'-O-methoxyethyl modified 5-methylcytosine
  modified_base 4: mod_base = OTHER; note = 2'-O-methoxyethyl modified thymine with phosphorothioate linkage
  modified_base 5: mod_base = OTHER; note = Nucleotide with phosphorothioate linkage
  modified_base 6: mod_base = OTHER; note = Nucleotide with phosphorothioate linkage
  modified_base 7: mod_base = OTHER; note = Nucleotide with phosphorothioate linkage
  modified_base 8: mod_base = OTHER; note = 5-methylcytosine with phosphorothioate linkage
  modified_base 9: mod_base = OTHER; note = Nucleotide with phosphorothioate linkage
  modified_base 10: mod_base = OTHER; note = Nucleotide with phosphorothioate linkage
  modified_base 11: mod_base = OTHER; note = 5-methylcytosine with phosphorothioate linkage
  modified_base 12: mod_base = OTHER; note = Nucleotide with phosphorothioate linkage
  modified_base 13: mod_base = OTHER; note = Nucleotide with phosphorothioate linkage
  modified_base 14: mod_base = OTHER; note = 5-methylcytosine with phosphorothioate linkage
  modified_base 15: mod_base = OTHER; note = Nucleotide with phosphorothioate linkage
  modified_base 16: mod_base = OTHER; note = 2'-O-methoxyethyl modified 5-methylcytosine
  modified_base 17: mod_base = OTHER; note = 2'-O-methoxyethyl modified nucleotide
  modified_base 18: mod_base = OTHER; note = 2'-O-methoxyethyl modified 5-methylcytosine
  modified_base 19: mod_base = OTHER; note = 2'-O-methoxyethyl modified thymine with phosphorothioate linkage
  modified_base 20: mod_base = OTHER; note = 2'-O-methoxyethyl modified thymine
  misc_feature 1..4: note = RNA
  misc_feature 5..15: note = DNA
  misc_feature 16..20: note = RNA
tgctttgcagctgctcgctt

SEQ ID NO: 465 - DNA, 20 bp, synthetic construct
  source 1..20: mol_type = other DNA
  modified_base 1: mod_base = OTHER; note = 2'-O-methoxyethyl modified nucleotide with phosphorothioate linkage
  modified_base 2: mod_base = OTHER; note = 2'-O-methoxyethyl modified thymine
  modified_base 3: mod_base = OTHER; note = 2'-O-methoxyethyl modified nucleotide
  modified_base 4: mod_base = OTHER; note = 2'-O-methoxyethyl modified 5-methylcytosine with phosphorothioate linkage
  modified_base 5: mod_base = OTHER; note = Nucleotide with phosphorothioate linkage
  modified_base 6: mod_base = OTHER; note = Nucleotide with phosphorothioate linkage
  modified_base 7: mod_base = OTHER; note = Nucleotide with phosphorothioate linkage
  modified_base 8: mod_base = OTHER; note = Nucleotide with phosphorothioate linkage
  modified_base 9: mod_base = OTHER; note = 5-methylcytosine with phosphorothioate linkage
  modified_base 10: mod_base = OTHER; note = Nucleotide with phosphorothioate linkage
  modified_base 11: mod_base = OTHER; note = Nucleotide with phosphorothioate linkage
  modified_base 12: mod_base = OTHER; note = 5-methylcytosine with phosphorothioate linkage
  modified_base 13: mod_base = OTHER; note = Nucleotide with phosphorothioate linkage
  modified_base 14: mod_base = OTHER; note = Nucleotide with phosphorothioate linkage
  modified_base 15: mod_base = OTHER; note = 5-methylcytosine with phosphorothioate linkage
  modified_base 16: mod_base = OTHER; note = 2'-O-methoxyethyl modified thymine
  modified_base 17: mod_base = OTHER; note = 2'-O-methoxyethyl modified 5-methylcytosine
  modified_base 18: mod_base = OTHER; note = 2'-O-methoxyethyl modified nucleotide
  modified_base 19: mod_base = OTHER; note = 2'-O-methoxyethyl modified 5-methylcytosine with phosphorothioate linkage
  modified_base 20: mod_base = OTHER; note = 2'-O-methoxyethyl modified thymine
  misc_feature 1..4: note = RNA
  misc_feature 5..15: note = DNA
  misc_feature 16..20: note = RNA
atgctttgcagctgctcgct

SEQ ID NO: 466 - DNA, 20 bp, synthetic construct
  source 1..20: mol_type = other DNA
  modified_base 1: mod_base = OTHER; note = 2'-O-methoxyethyl modified nucleotide with phosphorothioate linkage
  modified_base 2: mod_base = OTHER; note = 2'-O-methoxyethyl modified nucleotide
  modified_base 3: mod_base = OTHER; note = 2'-O-methoxyethyl modified thymine
  modified_base 4: mod_base = OTHER; note = 2'-O-methoxyethyl modified nucleotide with phosphorothioate linkage
  modified_base 5: mod_base = OTHER; note = 5-methylcytosine with phosphorothioate linkage
  modified_base 6: mod_base = OTHER; note = Nucleotide with phosphorothioate linkage
  modified_base 7: mod_base = OTHER; note = Nucleotide with phosphorothioate linkage
  modified_base 8: mod_base = OTHER; note = Nucleotide with phosphorothioate linkage
  modified_base 9: mod_base = OTHER; note = Nucleotide with phosphorothioate linkage
  modified_base 10: mod_base = OTHER; note = 5-methylcytosine with phosphorothioate linkage
  modified_base 11: mod_base = OTHER; note = Nucleotide with phosphorothioate linkage
  modified_base 12: mod_base = OTHER; note = Nucleotide with phosphorothioate linkage
  modified_base 13: mod_base = OTHER; note = 5-methylcytosine with phosphorothioate linkage
  modified_base 14: mod_base = OTHER; note = Nucleotide with phosphorothioate linkage
  modified_base 15: mod_base = OTHER; note = Nucleotide with phosphorothioate linkage
  modified_base 16: mod_base = OTHER; note = 2'-O-methoxyethyl modified 5-methylcytosine
  modified_base 17: mod_base = OTHER; note = 2'-O-methoxyethyl modified thymine
  modified_base 18: mod_base = OTHER; note = 2'-O-methoxyethyl modified 5-methylcytosine
  modified_base 19: mod_base = OTHER; note = 2'-O-methoxyethyl modified nucleotide with phosphorothioate linkage
  modified_base 20: mod_base = OTHER; note = 2'-O-methoxyethyl modified 5-methylcytosine
  misc_feature 1..4: note = RNA
  misc_feature 5..15: note = DNA
  misc_feature 16..20: note = RNA
gatgctttgcagctgctcgc

SEQ ID NO: 467 - DNA, 20 bp, synthetic construct
  source 1..20: mol_type = other DNA
  modified_base 1: mod_base = OTHER; note = 2'-O-methoxyethyl modified nucleotide with phosphorothioate linkage
  modified_base 2: mod_base = OTHER; note = 2'-O-methoxyethyl modified nucleotide
  modified_base 3: mod_base = OTHER; note = 2'-O-methoxyethyl modified nucleotide
  modified_base 4: mod_base = OTHER; note = 2'-O-methoxyethyl modified thymine with phosphorothioate linkage
  modified_base 5: mod_base = OTHER; note = Nucleotide with phosphorothioate linkage
  modified_base 6: mod_base = OTHER; note = 5-methylcytosine with phosphorothioate linkage
  modified_base 7: mod_base = OTHER; note = Nucleotide with phosphorothioate linkage
  modified_base 8: mod_base = OTHER; note = Nucleotide with phosphorothioate linkage
  modified_base 9: mod_base = OTHER; note = Nucleotide with phosphorothioate linkage
  modified_base 10: mod_base = OTHER; note = Nucleotide with phosphorothioate linkage
  modified_base 11: mod_base = OTHER; note = 5-methylcytosine with phosphorothioate linkage
  modified_base 12: mod_base = OTHER; note = Nucleotide with phosphorothioate linkage
  modified_base 13: mod_base = OTHER; note = Nucleotide with phosphorothioate linkage
  modified_base 14: mod_base = OTHER; note = 5-methylcytosine with phosphorothioate linkage
  modified_base 15: mod_base = OTHER; note = Nucleotide with phosphorothioate linkage
  modified_base 16: mod_base = OTHER; note = 2'-O-methoxyethyl modified nucleotide
  modified_base 17: mod_base = OTHER; note = 2'-O-methoxyethyl modified 5-methylcytosine
  modified_base 18: mod_base = OTHER; note = 2'-O-methoxyethyl modified thymine
  modified_base 19: mod_base = OTHER; note = 2'-O-methoxyethyl modified 5-methylcytosine with phosphorothioate linkage
  modified_base 20: mod_base = OTHER; note = 2'-O-methoxyethyl modified nucleotide
  misc_feature 1..4: note = RNA
  misc_feature 5..15: note = DNA
  misc_feature 16..20: note = RNA
agatgctttgcagctgctcg

SEQ ID NO: 468 - DNA, 20 bp, synthetic construct
  source 1..20: mol_type = other DNA
  modified_base 1: mod_base = OTHER; note = 2'-O-methoxyethyl modified 5-methylcytosine with phosphorothioate linkage
  modified_base 2: mod_base = OTHER; note = 2'-O-methoxyethyl modified thymine
  modified_base 3: mod_base = OTHER; note = 2'-O-methoxyethyl modified nucleotide
  modified_base 4: mod_base = OTHER; note = 2'-O-methoxyethyl modified nucleotide with phosphorothioate linkage
  modified_base 5: mod_base = OTHER; note = Nucleotide with phosphorothioate linkage
  modified_base 6: mod_base = OTHER; note = Nucleotide with phosphorothioate linkage
  modified_base 7: mod_base = OTHER; note = Nucleotide with phosphorothioate linkage
  modified_base 8: mod_base = OTHER; note = Nucleotide with phosphorothioate linkage
  modified_base 9: mod_base = OTHER; note = Nucleotide with phosphorothioate linkage
  modified_base 10: mod_base = OTHER; note = Nucleotide with phosphorothioate linkage
  modified_base 11: mod_base = OTHER; note = Nucleotide with phosphorothioate linkage
  modified_base 12: mod_base = OTHER; note = Nucleotide with phosphorothioate linkage
  modified_base 13: mod_base = OTHER; note = Nucleotide with phosphorothioate linkage
  modified_base 14: mod_base = OTHER; note = 5-methylcytosine with phosphorothioate linkage
  modified_base 15: mod_base = OTHER; note = Nucleotide with phosphorothioate linkage
  modified_base 16: mod_base = OTHER; note = 2'-O-methoxyethyl modified thymine
  modified_base 17: mod_base = OTHER; note = 2'-O-methoxyethyl modified thymine
  modified_base 18: mod_base = OTHER; note = 2'-O-methoxyethyl modified 5-methylcytosine
  modified_base 19: mod_base = OTHER; note = 2'-O-methoxyethyl modified thymine with phosphorothioate linkage
  modified_base 20: mod_base = OTHER; note = 2'-O-methoxyethyl modified nucleotide
  misc_feature 1..4: note = RNA
  misc_feature 5..15: note = DNA
  misc_feature 16..20: note = RNA
ctggtggtagtagcgttcta

SEQ ID NO: 469 - DNA, 20 bp, synthetic construct
  source 1..20: mol_type = other DNA
  modified_base 1: mod_base = OTHER; note = 2'-O-methoxyethyl modified nucleotide with phosphorothioate linkage
  modified_base 2: mod_base = OTHER; note = 2'-O-methoxyethyl modified 5-methylcytosine
  modified_base 3: mod_base = OTHER; note = 2'-O-methoxyethyl modified thymine
  modified_base 4: mod_base = OTHER; note = 2'-O-methoxyethyl modified nucleotide with phosphorothioate linkage
  modified_base 5: mod_base = OTHER; note = Nucleotide with phosphorothioate linkage
  modified_base 6: mod_base = OTHER; note = Nucleotide with phosphorothioate linkage
  modified_base 7: mod_base = OTHER; note = Nucleotide with phosphorothioate linkage
  modified_base 8: mod_base = OTHER; note = Nucleotide with phosphorothioate linkage
  modified_base 9: mod_base = OTHER; note = Nucleotide with phosphorothioate linkage
  modified_base 10: mod_base = OTHER; note = Nucleotide with phosphorothioate linkage
  modified_base 11: mod_base = OTHER; note = Nucleotide with phosphorothioate linkage
  modified_base 12: mod_base = OTHER; note = Nucleotide with phosphorothioate linkage
  modified_base 13: mod_base = OTHER; note = Nucleotide with phosphorothioate linkage
  modified_base 14: mod_base = OTHER; note = Nucleotide with phosphorothioate linkage
  modified_base 15: mod_base = OTHER; note = 5-methylcytosine with phosphorothioate linkage
  modified_base 16: mod_base = OTHER; note = 2'-O-methoxyethyl modified nucleotide
  modified_base 17: mod_base = OTHER; note = 2'-O-methoxyethyl modified thymine
  modified_base 18: mod_base = OTHER; note = 2'-O-methoxyethyl modified thymine
  modified_base 19: mod_base = OTHER; note = 2'-O-methoxyethyl modified 5-methylcytosine with phosphorothioate linkage
  modified_base 20: mod_base = OTHER; note = 2'-O-methoxyethyl modified thymine
  misc_feature 1..4: note = RNA
  misc_feature 5..15: note = DNA
  misc_feature 16..20: note = RNA
actggtggtagtagcgttct

SEQ ID NO: 470 - DNA, 20 bp, synthetic construct
  source 1..20: mol_type = other DNA
  modified_base 1: mod_base = OTHER; note = 2'-O-methoxyethyl modified nucleotide with phosphorothioate linkage
  modified_base 2: mod_base = OTHER; note = 2'-O-methoxyethyl modified nucleotide
  modified_base 3: mod_base = OTHER; note = 2'-O-methoxyethyl modified 5-methylcytosine
  modified_base 4: mod_base = OTHER; note = 2'-O-methoxyethyl modified thymine with phosphorothioate linkage
  modified_base 5: mod_base = OTHER; note = Nucleotide with phosphorothioate linkage
  modified_base 6: mod_base = OTHER; note = Nucleotide with phosphorothioate linkage
  modified_base 7: mod_base = OTHER; note = Nucleotide with phosphorothioate linkage
  modified_base 8: mod_base = OTHER; note = Nucleotide with phosphorothioate linkage
  modified_base 9: mod_base = OTHER; note = Nucleotide with phosphorothioate linkage
  modified_base 10: mod_base = OTHER; note = Nucleotide with phosphorothioate linkage
  modified_base 11: mod_base = OTHER; note = Nucleotide with phosphorothioate linkage
  modified_base 12: mod_base = OTHER; note = Nucleotide with phosphorothioate linkage
  modified_base 13: mod_base = OTHER; note = Nucleotide with phosphorothioate linkage
  modified_base 14: mod_base = OTHER; note = Nucleotide with phosphorothioate linkage
  modified_base 15: mod_base = OTHER; note = Nucleotide with phosphorothioate linkage
  modified_base 16: mod_base = OTHER; note = 2'-O-methoxyethyl modified 5-methylcytosine
  modified_base 17: mod_base = OTHER; note = 2'-O-methoxyethyl modified nucleotide
  modified_base 18: mod_base = OTHER; note = 2'-O-methoxyethyl modified thymine
  modified_base 19: mod_base = OTHER; note = 2'-O-methoxyethyl modified thymine with phosphorothioate linkage
  modified_base 20: mod_base = OTHER; note = 2'-O-methoxyethyl modified 5-methylcytosine
  misc_feature 1..4: note = RNA
  misc_feature 5..15: note = DNA
  misc_feature 16..20: note = RNA
aactggtggtagtagcgttc

SEQ ID NO: 471 - DNA, 20 bp, synthetic construct
  source 1..20: mol_type = other DNA
  modified_base 1: mod_base = OTHER; note = 2'-O-methoxyethyl modified nucleotide with phosphorothioate linkage
  modified_base 2: mod_base = OTHER; note = 2'-O-methoxyethyl modified thymine
  modified_base 3: mod_base = OTHER; note = 2'-O-methoxyethyl modified thymine
  modified_base 4: mod_base = OTHER; note = 2'-O-methoxyethyl modified nucleotide with phosphorothioate linkage
  modified_base 5: mod_base = OTHER; note = Nucleotide with phosphorothioate linkage
  modified_base 6: mod_base = OTHER; note = 5-methylcytosine with phosphorothioate linkage
  modified_base 7: mod_base = OTHER; note = Nucleotide with phosphorothioate linkage
  modified_base 8: mod_base = OTHER; note = Nucleotide with phosphorothioate linkage
  modified_base 9: mod_base = OTHER; note = Nucleotide with phosphorothioate linkage
  modified_base 10: mod_base = OTHER; note = Nucleotide with phosphorothioate linkage
  modified_base 11: mod_base = OTHER; note = Nucleotide with phosphorothioate linkage
  modified_base 12: mod_base = OTHER; note = Nucleotide with phosphorothioate linkage
  modified_base 13: mod_base = OTHER; note = Nucleotide with phosphorothioate linkage
  modified_base 14: mod_base = OTHER; note = Nucleotide with phosphorothioate linkage
  modified_base 15: mod_base = OTHER; note = Nucleotide with phosphorothioate linkage
  modified_base 16: mod_base = OTHER; note = 2'-O-methoxyethyl modified thymine
  modified_base 17: mod_base = OTHER; note = 2'-O-methoxyethyl modified nucleotide
  modified_base 18: mod_base = OTHER; note = 2'-O-methoxyethyl modified nucleotide
  modified_base 19: mod_base = OTHER; note = 2'-O-methoxyethyl modified 5-methylcytosine with phosphorothioate linkage
  modified_base 20: mod_base = OTHER; note = 2'-O-methoxyethyl modified nucleotide
  misc_feature 1..4: note = RNA
  misc_feature 5..15: note = DNA
  misc_feature 16..20: note = RNA
gttaactggtggtagtagcg

SEQ ID NO: 472 - DNA, 20 bp, synthetic construct
  source 1..20: mol_type = other DNA
  modified_base 1: mod_base = OTHER; note = 2'-O-methoxyethyl modified nucleotide with phosphorothioate linkage
  modified_base 2: mod_base = OTHER; note = 2'-O-methoxyethyl modified nucleotide
  modified_base 3: mod_base = OTHER; note = 2'-O-methoxyethyl modified 5-methylcytosine
  modified_base 4: mod_base = OTHER; note = 2'-O-methoxyethyl modified 5-methylcytosine with phosphorothioate linkage
  modified_base 5: mod_base = OTHER; note = 5-methylcytosine with phosphorothioate linkage
  modified_base 6: mod_base = OTHER; note = Nucleotide with phosphorothioate linkage
  modified_base 7: mod_base = OTHER; note = 5-methylcytosine with phosphorothioate linkage
  modified_base 8: mod_base = OTHER; note = Nucleotide with phosphorothioate linkage
  modified_base 9: mod_base = OTHER; note = Nucleotide with phosphorothioate linkage
  modified_base 10: mod_base = OTHER; note = Nucleotide with phosphorothioate linkage
  modified_base 11: mod_base = OTHER; note = Nucleotide with phosphorothioate linkage
  modified_base 12: mod_base = OTHER; note = Nucleotide with phosphorothioate linkage
  modified_base 13: mod_base = OTHER; note = Nucleotide with phosphorothioate linkage
  modified_base 14: mod_base = OTHER; note = 5-methylcytosine with phosphorothioate linkage
  modified_base 15: mod_base = OTHER; note = Nucleotide with phosphorothioate linkage
  modified_base 16: mod_base = OTHER; note = 2'-O-methoxyethyl modified nucleotide
  modified_base 17: mod_base = OTHER; note = 2'-O-methoxyethyl modified nucleotide
  modified_base 18: mod_base = OTHER; note = 2'-O-methoxyethyl modified thymine
  modified_base 19: mod_base = OTHER; note = 2'-O-methoxyethyl modified nucleotide with phosphorothioate linkage
  modified_base 20: mod_base = OTHER; note = 2'-O-methoxyethyl modified nucleotide
  misc_feature 1..4: note = RNA
  misc_feature 5..15: note = DNA
  misc_feature 16..20: note = RNA
agccctcagttaactggtgg

SEQ ID NO: 473 - DNA, 20 bp, synthetic construct
  source 1..20: mol_type = other DNA
  modified_base 1: mod_base = OTHER; note = 2'-O-methoxyethyl modified 5-methylcytosine with phosphorothioate linkage
  modified_base 2: mod_base = OTHER; note = 2'-O-methoxyethyl modified nucleotide
  modified_base 3: mod_base = OTHER; note = 2'-O-methoxyethyl modified nucleotide
  modified_base 4: mod_base = OTHER; note = 2'-O-methoxyethyl modified 5-methylcytosine with phosphorothioate linkage
  modified_base 5: mod_base = OTHER; note = 5-methylcytosine with phosphorothioate linkage
  modified_base 6: mod_base = OTHER; note = 5-methylcytosine with phosphorothioate linkage
  modified_base 7: mod_base = OTHER; note = Nucleotide with phosphorothioate linkage
  modified_base 8: mod_base = OTHER; note = 5-methylcytosine with phosphorothioate linkage
  modified_base 9: mod_base = OTHER; note = Nucleotide with phosphorothioate linkage
  modified_base 10: mod_base = OTHER; note = Nucleotide with phosphorothioate linkage
  modified_base 11: mod_base = OTHER; note = Nucleotide with phosphorothioate linkage
  modified_base 12: mod_base = OTHER; note = Nucleotide with phosphorothioate linkage
  modified_base 13: mod_base = OTHER; note = Nucleotide with phosphorothioate linkage
  modified_base 14: mod_base = OTHER; note = Nucleotide with phosphorothioate linkage
  modified_base 15: mod_base = OTHER; note = 5-methylcytosine with phosphorothioate linkage
  modified_base 16: mod_base = OTHER; note = 2'-O-methoxyethyl modified thymine
  modified_base 17: mod_base = OTHER; note = 2'-O-methoxyethyl modified nucleotide
  modified_base 18: mod_base = OTHER; note = 2'-O-methoxyethyl modified nucleotide
  modified_base 19: mod_base = OTHER; note = 2'-O-methoxyethyl modified thymine with phosphorothioate linkage
  modified_base 20: mod_base = OTHER; note = 2'-O-methoxyethyl modified nucleotide
  misc_feature 1..4: note = RNA
  misc_feature 5..15: note = DNA
  misc_feature 16..20: note = RNA
cagccctcagttaactggtg

SEQ ID NO: 474 - DNA, 20 bp, synthetic construct
  source 1..20: mol_type = other DNA
  modified_base 1: mod_base = OTHER; note = 2'-O-methoxyethyl modified nucleotide with phosphorothioate linkage
  modified_base 2: mod_base = OTHER; note = 2'-O-methoxyethyl modified 5-methylcytosine
  modified_base 3: mod_base = OTHER; note = 2'-O-methoxyethyl modified nucleotide
  modified_base 4: mod_base = OTHER; note = 2'-O-methoxyethyl modified nucleotide with phosphorothioate linkage
  modified_base 5: mod_base = OTHER; note = 5-methylcytosine with phosphorothioate linkage
  modified_base 6: mod_base = OTHER; note = 5-methylcytosine with phosphorothioate linkage
  modified_base 7: mod_base = OTHER; note = 5-methylcytosine with phosphorothioate linkage
  modified_base 8: mod_base = OTHER; note = Nucleotide with phosphorothioate linkage
  modified_base 9: mod_base = OTHER; note = 5-methylcytosine with phosphorothioate linkage
  modified_base 10: mod_base = OTHER; note = Nucleotide with phosphorothioate linkage
  modified_base 11: mod_base = OTHER; note = Nucleotide with phosphorothioate linkage
  modified_base 12: mod_base = OTHER; note = Nucleotide with phosphorothioate linkage
  modified_base 13: mod_base = OTHER; note = Nucleotide with phosphorothioate linkage
  modified_base 14: mod_base = OTHER; note = Nucleotide with phosphorothioate linkage
  modified_base 15: mod_base = OTHER; note = Nucleotide with phosphorothioate linkage
  modified_base 16: mod_base = OTHER; note = 2'-O-methoxyethyl modified 5-methylcytosine
  modified_base 17: mod_base = OTHER; note = 2'-O-methoxyethyl modified thymine
  modified_base 18: mod_base = OTHER; note = 2'-O-methoxyethyl modified nucleotide
  modified_base 19: mod_base = OTHER; note = 2'-O-methoxyethyl modified nucleotide with phosphorothioate linkage
  modified_base 20: mod_base = OTHER; note = 2'-O-methoxyethyl modified thymine
  misc_feature 1..4: note = RNA
  misc_feature 5..15: note = DNA
  misc_feature 16..20: note = RNA
acagccctcagttaactggt

SEQ ID NO: 475 - DNA, 20 bp, synthetic construct
  source 1..20: mol_type = other DNA
  modified_base 1: mod_base = OTHER; note = 2'-O-methoxyethyl modified 5-methylcytosine with phosphorothioate linkage
  modified_base 2: mod_base = OTHER; note = 2'-O-methoxyethyl modified nucleotide
  modified_base 3: mod_base = OTHER; note = 2'-O-methoxyethyl modified 5-methylcytosine
  modified_base 4: mod_base = OTHER; note = 2'-O-methoxyethyl modified nucleotide with phosphorothioate linkage
  modified_base 5: mod_base = OTHER; note = Nucleotide with phosphorothioate linkage
  modified_base 6: mod_base = OTHER; note = 5-methylcytosine with phosphorothioate linkage
  modified_base 7: mod_base = OTHER; note = 5-methylcytosine with phosphorothioate linkage
  modified_base 8: mod_base = OTHER; note = 5-methylcytosine with phosphorothioate linkage
  modified_base 9: mod_base = OTHER; note = Nucleotide with phosphorothioate linkage
  modified_base 10: mod_base = OTHER; note = 5-methylcytosine with phosphorothioate linkage
  modified_base 11: mod_base = OTHER; note = Nucleotide with phosphorothioate linkage
  modified_base 12: mod_base = OTHER; note = Nucleotide with phosphorothioate linkage
  modified_base 13: mod_base = OTHER; note = Nucleotide with phosphorothioate linkage
  modified_base 14: mod_base = OTHER; note = Nucleotide with phosphorothioate linkage
  modified_base 15: mod_base = OTHER; note = Nucleotide with phosphorothioate linkage
  modified_base 16: mod_base = OTHER; note = 2'-O-methoxyethyl modified nucleotide
  modified_base 17: mod_base = OTHER; note = 2'-O-methoxyethyl modified 5-methylcytosine
  modified_base 18: mod_base = OTHER; note = 2'-O-methoxyethyl modified thymine
  modified_base 19: mod_base = OTHER; note = 2'-O-methoxyethyl modified nucleotide with phosphorothioate linkage
  modified_base 20: mod_base = OTHER; note = 2'-O-methoxyethyl modified nucleotide
  misc_feature 1..4: note = RNA
  misc_feature 5..15: note = DNA
  misc_feature 16..20: note = RNA
cacagccctcagttaactgg

SEQ ID NO: 476 - DNA, 20 bp, synthetic construct
  source 1..20: mol_type = other DNA
  modified_base 1: mod_base = OTHER; note = 2'-O-methoxyethyl modified 5-methylcytosine with phosphorothioate linkage
  modified_base 2: mod_base = OTHER; note = 2'-O-methoxyethyl modified 5-methylcytosine
  modified_base 3: mod_base = OTHER; note = 2'-O-methoxyethyl modified nucleotide
  modified_base 4: mod_base = OTHER; note = 2'-O-methoxyethyl modified 5-methylcytosine with phosphorothioate linkage
  modified_base 5: mod_base = OTHER; note = Nucleotide with phosphorothioate linkage
  modified_base 6: mod_base = OTHER; note = Nucleotide with phosphorothioate linkage
  modified_base 7: mod_base = OTHER; note = 5-methylcytosine with phosphorothioate linkage
  modified_base 8: mod_base = OTHER; note = 5-methylcytosine with phosphorothioate linkage
  modified_base 9: mod_base = OTHER; note = 5-methylcytosine with phosphorothioate linkage
  modified_base 10: mod_base = OTHER; note = Nucleotide with phosphorothioate linkage
  modified_base 11: mod_base = OTHER; note = 5-methylcytosine with phosphorothioate linkage
  modified_base 12: mod_base = OTHER; note = Nucleotide with phosphorothioate linkage
  modified_base 13: mod_base = OTHER; note = Nucleotide with phosphorothioate linkage
  modified_base 14: mod_base = OTHER; note = Nucleotide with phosphorothioate linkage
  modified_base 15: mod_base = OTHER; note = Nucleotide with phosphorothioate linkage
  modified_base 16: mod_base = OTHER; note = 2'-O-methoxyethyl modified nucleotide
  modified_base 17: mod_base = OTHER; note = 2'-O-methoxyethyl modified nucleotide
  modified_base 18: mod_base = OTHER; note = 2'-O-methoxyethyl modified 5-methylcytosine
  modified_base 19: mod_base = OTHER; note = 2'-O-methoxyethyl modified thymine with phosphorothioate linkage
  modified_base 20: mod_base = OTHER; note = 2'-O-methoxyethyl modified nucleotide
  misc_feature 1..4: note = RNA
  misc_feature 5..15: note = DNA
  misc_feature 16..20: note = RNA
ccacagccctcagttaactg

SEQ ID NO: 477 - DNA, 20 bp, synthetic construct
  source 1..20: mol_type = other DNA
  modified_base 1: mod_base = OTHER; note = 2'-O-methoxyethyl modified thymine with phosphorothioate linkage
  modified_base 2: mod_base = OTHER; note = 2'-O-methoxyethyl modified 5-methylcytosine
  modified_base 3: mod_base = OTHER; note = 2'-O-methoxyethyl modified 5-methylcytosine
  modified_base 4: mod_base = OTHER; note = 2'-O-methoxyethyl modified nucleotide with phosphorothioate linkage
  modified_base 5: mod_base = OTHER; note = 5-methylcytosine with phosphorothioate linkage
  modified_base 6: mod_base = OTHER; note = Nucleotide with phosphorothioate linkage
  modified_base 7: mod_base = OTHER; note = Nucleotide with phosphorothioate linkage
  modified_base 8: mod_base = OTHER; note = 5-methylcytosine with phosphorothioate linkage
  modified_base 9: mod_base = OTHER; note = 5-methylcytosine with phosphorothioate linkage
  modified_base 10: mod_base = OTHER; note = 5-methylcytosine with phosphorothioate linkage
  modified_base 11: mod_base = OTHER; note = Nucleotide with phosphorothioate linkage
  modified_base 12: mod_base = OTHER; note = 5-methylcytosine with phosphorothioate linkage
  modified_base 13: mod_base = OTHER; note = Nucleotide with phosphorothioate linkage
  modified_base 14: mod_base = OTHER; note = Nucleotide with phosphorothioate linkage
  modified_base 15: mod_base = OTHER; note = Nucleotide with phosphorothioate linkage
  modified_base 16: mod_base = OTHER; note = 2'-O-methoxyethyl modified thymine
  modified_base 17: mod_base = OTHER; note = 2'-O-methoxyethyl modified nucleotide
  modified_base 18: mod_base = OTHER; note = 2'-O-methoxyethyl modified nucleotide
  modified_base 19: mod_base = OTHER; note = 2'-O-methoxyethyl modified 5-methylcytosine with phosphorothioate linkage
  modified_base 20: mod_base = OTHER; note = 2'-O-methoxyethyl modified thymine
  misc_feature 1..4: note = RNA
  misc_feature 5..15: note = DNA
  misc_feature 16..20: note = RNA
tccacagccctcagttaact

SEQ ID NO: 478 - DNA, 20 bp, synthetic construct
  source 1..20: mol_type = other DNA
  modified_base 1: mod_base = OTHER; note = 2'-O-methoxyethyl modified thymine with phosphorothioate linkage
  modified_base 2: mod_base = OTHER; note = 2'-O-methoxyethyl modified thymine
  modified_base 3: mod_base = OTHER; note = 2'-O-methoxyethyl modified 5-methylcytosine
  modified_base 4: mod_base = OTHER; note = 2'-O-methoxyethyl modified 5-methylcytosine with phosphorothioate linkage
  modified_base 5: mod_base = OTHER; note = Nucleotide with phosphorothioate linkage
  modified_base 6: mod_base = OTHER; note = 5-methylcytosine with phosphorothioate linkage
  modified_base 7: mod_base = OTHER; note = Nucleotide with phosphorothioate linkage
  modified_base 8: mod_base = OTHER; note = Nucleotide with phosphorothioate linkage
  modified_base 9: mod_base = OTHER; note = 5-methylcytosine with phosphorothioate linkage
  modified_base 10: mod_base = OTHER; note = 5-methylcytosine with phosphorothioate linkage
  modified_base 11: mod_base = OTHER; note = 5-methylcytosine with phosphorothioate linkage
  modified_base 12: mod_base = OTHER; note = Nucleotide with phosphorothioate linkage
  modified_base 13: mod_base = OTHER; note = 5-methylcytosine with phosphorothioate linkage
  modified_base 14: mod_base = OTHER; note = Nucleotide with phosphorothioate linkage
  modified_base 15: mod_base = OTHER; note = Nucleotide with phosphorothioate linkage
  modified_base 16: mod_base = OTHER; note = 2'-O-methoxyethyl modified thymine
  modified_base 17: mod_base = OTHER; note = 2'-O-methoxyethyl modified thymine
  modified_base 18: mod_base = OTHER; note = 2'-O-methoxyethyl modified nucleotide
  modified_base 19: mod_base = OTHER; note = 2'-O-methoxyethyl modified nucleotide with phosphorothioate linkage
  modified_base 20: mod_base = OTHER; note = 2'-O-methoxyethyl modified 5-methylcytosine
  misc_feature 1..4: note = RNA
  misc_feature 5..15: note = DNA
  misc_feature 16..20: note = RNA
ttccacagccctcagttaac

SEQ ID NO: 479 - DNA, 20 bp, synthetic construct
  source 1..20: mol_type = other DNA
  modified_base 1: mod_base = OTHER; note = 2'-O-methoxyethyl modified thymine with phosphorothioate linkage
  modified_base 2: mod_base = OTHER; note = 2'-O-methoxyethyl modified thymine
  modified_base 3: mod_base = OTHER; note = 2'-O-methoxyethyl modified 5-methylcytosine
  modified_base 4: mod_base = OTHER; note = 2'-O-methoxyethyl modified 5-methylcytosine with phosphorothioate linkage
  modified_base 5: mod_base = OTHER; note = Nucleotide with phosphorothioate linkage
  modified_base 6: mod_base = OTHER; note = 5-methylcytosine with phosphorothioate linkage
  modified_base 7: mod_base = OTHER; note = Nucleotide with phosphorothioate linkage
  modified_base 8: mod_base = OTHER; note = Nucleotide with phosphorothioate linkage
  modified_base 9: mod_base = OTHER; note = 5-methylcytosine with phosphorothioate linkage
  modified_base 10: mod_base = OTHER; note = 5-methylcytosine with phosphorothioate linkage
  modified_base 11: mod_base = OTHER; note = 5-methylcytosine with phosphorothioate linkage
  modified_base 12: mod_base = OTHER; note = Nucleotide with phosphorothioate linkage
  modified_base 13: mod_base = OTHER; note = 5-methylcytosine with phosphorothioate linkage
  modified_base 14: mod_base = OTHER; note = Nucleotide with phosphorothioate linkage
  modified_base 15: mod_base = OTHER; note = Nucleotide with phosphorothioate linkage
  modified_base 16: mod_base = OTHER; note = 2'-O-methoxyethyl modified thymine
  modified_base 17: mod_base = OTHER; note = 2'-O-methoxyethyl modified thymine
  modified_base 18: mod_base = OTHER; note = 2'-O-methoxyethyl modified nucleotide
  modified_base 19: mod_base = OTHER; note = 2'-O-methoxyethyl modified nucleotide with phosphorothioate linkage
  modified_base 20: mod_base = OTHER; note = 2'-O-methoxyethyl modified 5-methylcytosine
  misc_feature 1..4: note = RNA
  misc_feature 5..15: note = DNA
  misc_feature 16..20: note = RNA
ttccacagccctcagttgac

SEQ ID NO: 480 - DNA, 20 bp, synthetic construct
  source 1..20: mol_type = other DNA
  modified_base 1: mod_base = OTHER; note = 2'-O-methoxyethyl modified thymine with phosphorothioate linkage
  modified_base 2: mod_base = OTHER; note = 2'-O-methoxyethyl modified thymine
  modified_base 3: mod_base = OTHER; note = 2'-O-methoxyethyl modified 5-methylcytosine
  modified_base 4: mod_base = OTHER; note = 2'-O-methoxyethyl modified 5-methylcytosine with phosphorothioate linkage
  modified_base 5: mod_base = OTHER; note = Nucleotide with phosphorothioate linkage
  modified_base 6: mod_base = OTHER; note = 5-methylcytosine with phosphorothioate linkage
  modified_base 7: mod_base = OTHER; note = Nucleotide with phosphorothioate linkage
  modified_base 8: mod_base = OTHER; note = Nucleotide with phosphorothioate linkage
  modified_base 9: mod_base = OTHER; note = 5-methylcytosine with phosphorothioate linkage
  modified_base 10: mod_base = OTHER; note = Nucleotide with phosphorothioate linkage
  modified_base 11: mod_base = OTHER; note = 5-methylcytosine with phosphorothioate linkage
  modified_base 12: mod_base = OTHER; note = Nucleotide with phosphorothioate linkage
  modified_base 13: mod_base = OTHER; note = 5-methylcytosine with phosphorothioate linkage
  modified_base 14: mod_base = OTHER; note = Nucleotide with phosphorothioate linkage
  modified_base 15: mod_base = OTHER; note = Nucleotide with phosphorothioate linkage
  modified_base 16: mod_base = OTHER; note = 2'-O-methoxyethyl modified thymine
  modified_base 17: mod_base = OTHER; note = 2'-O-methoxyethyl modified thymine
  modified_base 18: mod_base = OTHER; note = 2'-O-methoxyethyl modified nucleotide
  modified_base 19: mod_base = OTHER; note = 2'-O-methoxyethyl modified nucleotide with phosphorothioate linkage
  modified_base 20: mod_base = OTHER; note = 2'-O-methoxyethyl modified 5-methylcytosine
  misc_feature 1..4: note = RNA
  misc_feature 5..15: note = DNA
  misc_feature 16..20: note = RNA
ttccacagcgctcagttaac

SEQ ID NO: 481 - DNA, 20 bp, synthetic construct
  source 1..20: mol_type = other DNA
  modified_base 1: mod_base = OTHER; note = 2'-O-methoxyethyl modified 5-methylcytosine with phosphorothioate linkage
  modified_base 2: mod_base = OTHER; note = 2'-O-methoxyethyl modified nucleotide
  modified_base 3: mod_base = OTHER; note = 2'-O-methoxyethyl modified thymine
  modified_base 4: mod_base = OTHER; note = 2'-O-methoxyethyl modified thymine with phosphorothioate linkage
  modified_base 5: mod_base = OTHER; note = Nucleotide with phosphorothioate linkage
  modified_base 6: mod_base = OTHER; note = 5-methylcytosine with phosphorothioate linkage
  modified_base 7: mod_base = OTHER; note = 5-methylcytosine with phosphorothioate linkage
  modified_base 8: mod_base = OTHER; note = Nucleotide with phosphorothioate linkage
  modified_base 9: mod_base = OTHER; note = 5-methylcytosine with phosphorothioate linkage
  modified_base 10: mod_base = OTHER; note = Nucleotide with phosphorothioate linkage
  modified_base 11: mod_base = OTHER; note = Nucleotide with phosphorothioate linkage
  modified_base 12: mod_base = OTHER; note = 5-methylcytosine with phosphorothioate linkage
  modified_base 13: mod_base = OTHER; note = 5-methylcytosine with phosphorothioate linkage
  modified_base 14: mod_base = OTHER; note = 5-methylcytosine with phosphorothioate linkage
  modified_base 15: mod_base = OTHER; note = Nucleotide with phosphorothioate linkage
  modified_base 16: mod_base = OTHER; note = 2'-O-methoxyethyl modified 5-methylcytosine
  modified_base 17: mod_base = OTHER; note = 2'-O-methoxyethyl modified nucleotide
  modified_base 18: mod_base = OTHER; note = 2'-O-methoxyethyl modified nucleotide
  modified_base 19: mod_base = OTHER; note = 2'-O-methoxyethyl modified thymine with phosphorothioate linkage
  modified_base 20: mod_base = OTHER; note = 2'-O-methoxyethyl modified thymine
  misc_feature 1..4: note = RNA
  misc_feature 5..15: note = DNA
  misc_feature 16..20: note = RNA
catttccacagccctcagtt

SEQ ID NO: 482 - DNA, 20 bp, synthetic construct
  source 1..20: mol_type = other DNA
  modified_base 1: mod_base = OTHER; note = 2'-O-methoxyethyl modified thymine with phosphorothioate linkage
  modified_base 2: mod_base = OTHER; note = 2'-O-methoxyethyl modified 5-methylcytosine
  modified_base 3: mod_base = OTHER; note = 2'-O-methoxyethyl modified nucleotide
  modified_base 4: mod_base = OTHER; note = 2'-O-methoxyethyl modified thymine with phosphorothioate linkage
  modified_base 5: mod_base = OTHER; note = Nucleotide with phosphorothioate linkage
  modified_base 6: mod_base = OTHER; note = Nucleotide with phosphorothioate linkage
  modified_base 7: mod_base = OTHER; note = 5-methylcytosine with phosphorothioate linkage
  modified_base 8: mod_base = OTHER; note = 5-methylcytosine with phosphorothioate linkage
  modified_base 9: mod_base = OTHER; note = Nucleotide with phosphorothioate linkage
  modified_base 10: mod_base = OTHER; note = 5-methylcytosine with phosphorothioate linkage
  modified_base 11: mod_base = OTHER; note = Nucleotide with phosphorothioate linkage
  modified_base 12: mod_base = OTHER; note = Nucleotide with phosphorothioate linkage
  modified_base 13: mod_base = OTHER; note = 5-methylcytosine with phosphorothioate linkage
  modified_base 14: mod_base = OTHER; note = 5-methylcytosine with phosphorothioate linkage
  modified_base 15: mod_base = OTHER; note = 5-methylcytosine with phosphorothioate linkage
  modified_base 16: mod_base = OTHER; note = 2'-O-methoxyethyl modified thymine
  modified_base 17: mod_base = OTHER; note = 2'-O-methoxyethyl modified 5-methylcytosine
  modified_base 18: mod_base = OTHER; note = 2'-O-methoxyethyl modified nucleotide
  modified_base 19: mod_base = OTHER; note = 2'-O-methoxyethyl modified nucleotide with phosphorothioate linkage
  modified_base 20: mod_base = OTHER; note = 2'-O-methoxyethyl modified thymine
  misc_feature 1..4: note = RNA
  misc_feature 5..15: note = DNA
  misc_feature 16..20: note = RNA
tcatttccacagccctcagt

SEQ ID NO: 483 - DNA, 20 bp, synthetic construct
  source 1..20: mol_type = other DNA
  modified_base 1: mod_base = OTHER; note = 2'-O-methoxyethyl modified 5-methylcytosine with phosphorothioate linkage
  modified_base 2: mod_base = OTHER; note = 2'-O-methoxyethyl modified nucleotide
  modified_base 3: mod_base = OTHER; note = 2'-O-methoxyethyl modified nucleotide
  modified_base 4: mod_base = OTHER; note = 2'-O-methoxyethyl modified nucleotide with phosphorothioate linkage
  modified_base 5: mod_base = OTHER; note = 5-methylcytosine with phosphorothioate linkage
  modified_base 6: mod_base = OTHER; note = Nucleotide with phosphorothioate linkage
  modified_base 7: mod_base = OTHER; note = Nucleotide with phosphorothioate linkage
  modified_base 8: mod_base = OTHER; note = 5-methylcytosine with phosphorothioate linkage
  modified_base 9: mod_base = OTHER; note = Nucleotide with phosphorothioate linkage
  modified_base 10: mod_base = OTHER; note = Nucleotide with phosphorothioate linkage
  modified_base 11: mod_base = OTHER; note = Nucleotide with phosphorothioate linkage
  modified_base 12: mod_base = OTHER; note = Nucleotide with phosphorothioate linkage
  modified_base 13: mod_base = OTHER; note = 5-methylcytosine with phosphorothioate linkage
  modified_base 14: mod_base = OTHER; note = 5-methylcytosine with phosphorothioate linkage
  modified_base 15: mod_base = OTHER; note = Nucleotide with phosphorothioate linkage
  modified_base 16: mod_base = OTHER; note = 2'-O-methoxyethyl modified 5-methylcytosine
  modified_base 17: mod_base = OTHER; note = 2'-O-methoxyethyl modified nucleotide
  modified_base 18: mod_base = OTHER; note = 2'-O-methoxyethyl modified nucleotide
  modified_base 19: mod_base = OTHER; note = 2'-O-methoxyethyl modified 5-methylcytosine with phosphorothioate linkage
  modified_base 20: mod_base = OTHER; note = 2'-O-methoxyethyl modified 5-methylcytosine
  misc_feature 1..4: note = RNA
  misc_feature 5..15: note = DNA
  misc_feature 16..20: note = RNA
caggcttcatttccacagcc

SEQ ID NO: 484 - DNA, 20 bp, synthetic construct
  source 1..20: mol_type = other DNA
  modified_base 1: mod_base = OTHER; note = 2'-O-methoxyethyl modified nucleotide with phosphorothioate linkage
  modified_base 2: mod_base = OTHER; note = 2'-O-methoxyethyl modified 5-methylcytosine
  modified_base 3: mod_base = OTHER; note = 2'-O-methoxyethyl modified nucleotide
  modified_base 4: mod_base = OTHER; note = 2'-O-methoxyethyl modified nucleotide with phosphorothioate linkage
  modified_base 5: mod_base = OTHER; note = Nucleotide with phosphorothioate linkage
  modified_base 6: mod_base = OTHER; note = 5-methylcytosine with phosphorothioate linkage
  modified_base 7: mod_base = OTHER; note = Nucleotide with phosphorothioate linkage
  modified_base 8: mod_base = OTHER; note = Nucleotide with phosphorothioate linkage
  modified_base 9: mod_base = OTHER; note = 5-methylcytosine with phosphorothioate linkage
  modified_base 10: mod_base = OTHER; note = Nucleotide with phosphorothioate linkage
  modified_base 11: mod_base = OTHER; note = Nucleotide with phosphorothioate linkage
  modified_base 12: mod_base = OTHER; note = Nucleotide with phosphorothioate linkage
  modified_base 13: mod_base = OTHER; note = Nucleotide with phosphorothioate linkage
  modified_base 14: mod_base = OTHER; note = 5-methylcytosine with phosphorothioate linkage
  modified_base 15: mod_base = OTHER; note = 5-methylcytosine with phosphorothioate linkage
  modified_base 16: mod_base = OTHER; note = 2'-O-methoxyethyl modified nucleotide
  modified_base 17: mod_base = OTHER; note = 2'-O-methoxyethyl modified 5-methylcytosine
  modified_base 18: mod_base = OTHER; note = 2'-O-methoxyethyl modified nucleotide
  modified_base 19: mod_base = OTHER; note = 2'-O-methoxyethyl modified nucleotide with phosphorothioate linkage
  modified_base 20: mod_base = OTHER; note = 2'-O-methoxyethyl modified 5-methylcytosine
  misc_feature 1..4: note = RNA
  misc_feature 5..15: note = DNA
  misc_feature 16..20: note = RNA
gcaggcttcatttccacagc

SEQ ID NO: 485 - DNA, 20 bp, synthetic construct
  source 1..20: mol_type = other DNA
  modified_base 1: mod_base = OTHER; note = 2'-O-methoxyethyl modified thymine with phosphorothioate linkage
  modified_base 2: mod_base = OTHER; note = 2'-O-methoxyethyl modified nucleotide
  modified_base 3: mod_base = OTHER; note = 2'-O-methoxyethyl modified 5-methylcytosine
  modified_base 4: mod_base = OTHER; note = 2'-O-methoxyethyl modified nucleotide with phosphorothioate linkage
  modified_base 5: mod_base = OTHER; note = Nucleotide with phosphorothioate linkage
  modified_base 6: mod_base = OTHER; note = Nucleotide with phosphorothioate linkage
  modified_base 7: mod_base = OTHER; note = 5-methylcytosine with phosphorothioate linkage
  modified_base 8: mod_base = OTHER; note = Nucleotide with phosphorothioate linkage
  modified_base 9: mod_base = OTHER; note = Nucleotide with phosphorothioate linkage
  modified_base 10: mod_base = OTHER; note = 5-methylcytosine with phosphorothioate linkage
  modified_base 11: mod_base = OTHER; note = Nucleotide with phosphorothioate linkage
  modified_base 12: mod_base = OTHER; note = Nucleotide with phosphorothioate linkage
  modified_base 13: mod_base = OTHER; note = Nucleotide with phosphorothioate linkage
  modified_base 14: mod_base = OTHER; note = Nucleotide with phosphorothioate linkage
  modified_base 15: mod_base = OTHER; note = 5-methylcytosine with phosphorothioate linkage
  modified_base 16: mod_base = OTHER; note = 2'-O-methoxyethyl modified 5-methylcytosine
  modified_base 17: mod_base = OTHER; note = 2'-O-methoxyethyl modified nucleotide
  modified_base 18: mod_base = OTHER; note = 2'-O-methoxyethyl modified 5-methylcytosine
  modified_base 19: mod_base = OTHER; note = 2'-O-methoxyethyl modified nucleotide with phosphorothioate linkage
  modified_base 20: mod_base = OTHER; note = 2'-O-methoxyethyl modified nucleotide
  misc_feature 1..4: note = RNA
  misc_feature 5..15: note = DNA
  misc_feature 16..20: note = RNA
tgcaggcttcatttccacag

SEQ ID NO: 486 - DNA, 20 bp, synthetic construct
  source 1..20: mol_type = other DNA
  modified_base 1: mod_base = OTHER; note = 2'-O-methoxyethyl modified nucleotide with phosphorothioate linkage
  modified_base 2: mod_base = OTHER; note = 2'-O-methoxyethyl modified thymine
  modified_base 3: mod_base = OTHER; note = 2'-O-methoxyethyl modified nucleotide
  modified_base 4: mod_base = OTHER; note = 2'-O-methoxyethyl modified 5-methylcytosine with phosphorothioate linkage
  modified_base 5: mod_base = OTHER; note = Nucleotide with phosphorothioate linkage
  modified_base 6: mod_base = OTHER; note = Nucleotide with phosphorothioate linkage
  modified_base 7: mod_base = OTHER; note = Nucleotide with phosphorothioate linkage
  modified_base 8: mod_base = OTHER; note = 5-methylcytosine with phosphorothioate linkage
  modified_base 9: mod_base = OTHER; note = Nucleotide with phosphorothioate linkage
  modified_base 10: mod_base = OTHER; note = Nucleotide with phosphorothioate linkage
  modified_base 11: mod_base = OTHER; note = 5-methylcytosine with phosphorothioate linkage
  modified_base 12: mod_base = OTHER; note = Nucleotide with phosphorothioate linkage
  modified_base 13: mod_base = OTHER; note = Nucleotide with phosphorothioate linkage
  modified_base 14: mod_base = OTHER; note = Nucleotide with phosphorothioate linkage
  modified_base 15: mod_base = OTHER; note = Nucleotide with phosphorothioate linkage
  modified_base 16: mod_base = OTHER; note = 2'-O-methoxyethyl modified 5-methylcytosine
  modified_base 17: mod_base = OTHER; note = 2'-O-methoxyethyl modified 5-methylcytosine
  modified_base 18: mod_base = OTHER; note = 2'-O-methoxyethyl modified nucleotide
  modified_base 19: mod_base = OTHER; note = 2'-O-methoxyethyl modified 5-methylcytosine with phosphorothioate linkage
  modified_base 20: mod_base = OTHER; note = 2'-O-methoxyethyl modified nucleotide
  misc_feature 1..4: note = RNA
  misc_feature 5..15: note = DNA
  misc_feature 16..20: note = RNA
gtgcaggcttcatttccaca

SEQ ID NO: 487 - DNA, 20 bp, synthetic construct
  source 1..20: mol_type = other DNA
  modified_base 1: mod_base = OTHER; note = 2'-O-methoxyethyl modified 5-methylcytosine with phosphorothioate linkage
  modified_base 2: mod_base = OTHER; note = 2'-O-methoxyethyl modified nucleotide
  modified_base 3: mod_base = OTHER; note = 2'-O-methoxyethyl modified thymine
  modified_base 4: mod_base = OTHER; note = 2'-O-methoxyethyl modified nucleotide with phosphorothioate linkage
  modified_base 5: mod_base = OTHER; note = 5-methylcytosine with phosphorothioate linkage
  modified_base 6: mod_base = OTHER; note = Nucleotide with phosphorothioate linkage
  modified_base 7: mod_base = OTHER; note = Nucleotide with phosphorothioate linkage
  modified_base 8: mod_base = OTHER; note = Nucleotide with phosphorothioate linkage
  modified_base 9: mod_base = OTHER; note = 5-methylcytosine with phosphorothioate linkage
  modified_base 10: mod_base = OTHER; note = Nucleotide with phosphorothioate linkage
  modified_base 11: mod_base = OTHER; note = Nucleotide with phosphorothioate linkage
  modified_base 12: mod_base = OTHER; note = 5-methylcytosine with phosphorothioate linkage
  modified_base 13: mod_base = OTHER; note = Nucleotide with phosphorothioate linkage
  modified_base 14: mod_base = OTHER; note = Nucleotide with phosphorothioate linkage
  modified_base 15: mod_base = OTHER; note = Nucleotide with phosphorothioate linkage
  modified_base 16: mod_base = OTHER; note = 2'-O-methoxyethyl modified thymine
  modified_base 17: mod_base = OTHER; note = 2'-O-methoxyethyl modified 5-methylcytosine
  modified_base 18: mod_base = OTHER; note = 2'-O-methoxyethyl modified 5-methylcytosine
  modified_base 19: mod_base = OTHER; note = 2'-O-methoxyethyl modified nucleotide with phosphorothioate linkage
  modified_base 20: mod_base = OTHER; note = 2'-O-methoxyethyl modified 5-methylcytosine
  misc_feature 1..4: note = RNA
  misc_feature 5..15: note = DNA
  misc_feature 16..20: note = RNA
cgtgcaggcttcatttccac

SEQ ID NO: 488 - DNA, 20 bp, synthetic construct
  source 1..20: mol_type = other DNA
  modified_base 1: mod_base = OTHER; note = 2'-O-methoxyethyl modified thymine with phosphorothioate linkage
  modified_base 2: mod_base = OTHER; note = 2'-O-methoxyethyl modified 5-methylcytosine
  modified_base 3: mod_base = OTHER; note = 2'-O-methoxyethyl modified nucleotide
  modified_base 4: mod_base = OTHER; note = 2'-O-methoxyethyl modified thymine with phosphorothioate linkage
  modified_base 5: mod_base = OTHER; note = Nucleotide with phosphorothioate linkage
  modified_base 6: mod_base = OTHER; note = 5-methylcytosine with phosphorothioate linkage
  modified_base 7: mod_base = OTHER; note = Nucleotide with phosphorothioate linkage
  modified_base 8: mod_base = OTHER; note = Nucleotide with phosphorothioate linkage
  modified_base 9: mod_base = OTHER; note = Nucleotide with phosphorothioate linkage
  modified_base 10: mod_base = OTHER; note = 5-methylcytosine with phosphorothioate linkage
  modified_base 11: mod_base = OTHER; note = Nucleotide with phosphorothioate linkage
  modified_base 12: mod_base = OTHER; note = Nucleotide with phosphorothioate linkage
  modified_base 13: mod_base = OTHER; note = 5-methylcytosine with phosphorothioate linkage
  modified_base 14: mod_base = OTHER; note = Nucleotide with phosphorothioate linkage
  modified_base 15: mod_base = OTHER; note = Nucleotide with phosphorothioate linkage
  modified_base 16: mod_base = OTHER; note = 2'-O-methoxyethyl modified thymine
  modified_base 17: mod_base = OTHER; note = 2'-O-methoxyethyl modified thymine
  modified_base 18: mod_base = OTHER; note = 2'-O-methoxyethyl modified 5-methylcytosine
  modified_base 19: mod_base = OTHER; note = 2'-O-methoxyethyl modified 5-methylcytosine with phosphorothioate linkage
  modified_base 20: mod_base = OTHER; note = 2'-O-methoxyethyl modified nucleotide
  misc_feature 1..4: note = RNA
  misc_feature 5..15: note = DNA
  misc_feature 16..20: note = RNA
tcgtgcaggcttcatttcca

SEQ ID NO: 489 - DNA, 20 bp, synthetic construct
  source 1..20: mol_type = other DNA
  modified_base 1: mod_base = OTHER; note = 2'-O-methoxyethyl modified thymine with phosphorothioate linkage
  modified_base 2: mod_base = OTHER; note = 2'-O-methoxyethyl modified thymine
  modified_base 3: mod_base = OTHER; note = 2'-O-methoxyethyl modified 5-methylcytosine
  modified_base 4: mod_base = OTHER; note = 2'-O-methoxyethyl modified nucleotide with phosphorothioate linkage
  modified_base 5: mod_base = OTHER; note = Nucleotide with phosphorothioate linkage
  modified_base 6: mod_base = OTHER; note = Nucleotide with phosphorothioate linkage
  modified_base 7: mod_base = OTHER; note = 5-methylcytosine with phosphorothioate linkage
  modified_base 8: mod_base = OTHER; note = Nucleotide with phosphorothioate linkage
  modified_base 9: mod_base = OTHER; note = Nucleotide with phosphorothioate linkage
  modified_base 10: mod_base = OTHER; note = Nucleotide with phosphorothioate linkage
  modified_base 11: mod_base = OTHER; note = 5-methylcytosine with phosphorothioate linkage
  modified_base 12: mod_base = OTHER; note = Nucleotide with phosphorothioate linkage
  modified_base 13: mod_base = OTHER; note = Nucleotide with phosphorothioate linkage
  modified_base 14: mod_base = OTHER; note = 5-methylcytosine with phosphorothioate linkage
  modified_base 15: mod_base = OTHER; note = Nucleotide with phosphorothioate linkage
  modified_base 16: mod_base = OTHER; note = 2'-O-methoxyethyl modified thymine
  modified_base 17: mod_base = OTHER; note = 2'-O-methoxyethyl modified thymine
  modified_base 18: mod_base = OTHER; note = 2'-O-methoxyethyl modified thymine
  modified_base 19: mod_base = OTHER; note = 2'-O-methoxyethyl modified 5-methylcytosine with phosphorothioate linkage
  modified_base 20: mod_base = OTHER; note = 2'-O-methoxyethyl modified 5-methylcytosine
  misc_feature 1..4: note = RNA
  misc_feature 5..15: note = DNA
  misc_feature 16..20: note = RNA
ttcgtgcaggcttcatttcc

SEQ ID NO: 490 - DNA, 20 bp, synthetic construct
  source 1..20: mol_type = other DNA
  modified_base 1: mod_base = OTHER; note = 2'-O-methoxyethyl modified 5-methylcytosine with phosphorothioate linkage
  modified_base 2: mod_base = OTHER; note = 2'-O-methoxyethyl modified thymine
  modified_base 3: mod_base = OTHER; note = 2'-O-methoxyethyl modified 5-methylcytosine
  modified_base 4: mod_base = OTHER; note = 2'-O-methoxyethyl modified nucleotide with phosphorothioate linkage
  modified_base 5: mod_base = OTHER; note = Nucleotide with phosphorothioate linkage
  modified_base 6: mod_base = OTHER; note = Nucleotide with phosphorothioate linkage
  modified_base 7: mod_base = OTHER; note = 5-methylcytosine with phosphorothioate linkage
  modified_base 8: mod_base = OTHER; note = Nucleotide with phosphorothioate linkage
  modified_base 9: mod_base = OTHER; note = Nucleotide with phosphorothioate linkage
  modified_base 10: mod_base = OTHER; note = Nucleotide with phosphorothioate linkage
  modified_base 11: mod_base = OTHER; note = 5-methylcytosine with phosphorothioate linkage
  modified_base 12: mod_base = OTHER; note = Nucleotide with phosphorothioate linkage
  modified_base 13: mod_base = OTHER; note = Nucleotide with phosphorothioate linkage
  modified_base 14: mod_base = OTHER; note = Nucleotide with phosphorothioate linkage
  modified_base 15: mod_base = OTHER; note = 5-methylcytosine with phosphorothioate linkage
  modified_base 16: mod_base = OTHER; note = 2'-O-methoxyethyl modified thymine
  modified_base 17: mod_base = OTHER; note = 2'-O-methoxyethyl modified thymine
  modified_base 18: mod_base = OTHER; note = 2'-O-methoxyethyl modified 5-methylcytosine
  modified_base 19: mod_base = OTHER; note = 2'-O-methoxyethyl modified nucleotide with phosphorothioate linkage
  modified_base 20: mod_base = OTHER; note = 2'-O-methoxyethyl modified thymine
  misc_feature 1..4: note = RNA
  misc_feature 5..15: note = DNA
  misc_feature 16..20: note = RNA
ctcattcgtgcaggcttcat

SEQ ID NO: 491 - DNA, 20 bp, synthetic construct
  source 1..20: mol_type = other DNA
  modified_base 1: mod_base = OTHER; note = 2'-O-methoxyethyl modified 5-methylcytosine with phosphorothioate linkage
  modified_base 2: mod_base = OTHER; note = 2'-O-methoxyethyl modified nucleotide
  modified_base 3: mod_base = OTHER; note = 2'-O-methoxyethyl modified nucleotide
  modified_base 4: mod_base = OTHER; note = 2'-O-methoxyethyl modified nucleotide with phosphorothioate linkage
  modified_base 5: mod_base = OTHER; note = Nucleotide with phosphorothioate linkage
  modified_base 6: mod_base = OTHER; note = 5-methylcytosine with phosphorothioate linkage
  modified_base 7: mod_base = OTHER; note = Nucleotide with phosphorothioate linkage
  modified_base 8: mod_base = OTHER; note = 5-methylcytosine with phosphorothioate linkage
  modified_base 9: mod_base = OTHER; note = Nucleotide with phosphorothioate linkage
  modified_base 10: mod_base = OTHER; note = Nucleotide with phosphorothioate linkage
  modified_base 11: mod_base = OTHER; note = Nucleotide with phosphorothioate linkage
  modified_base 12: mod_base = OTHER; note = 5-methylcytosine with phosphorothioate linkage
  modified_base 13: mod_base = OTHER; note = Nucleotide with phosphorothioate linkage
  modified_base 14: mod_base = OTHER; note = Nucleotide with phosphorothioate linkage
  modified_base 15: mod_base = OTHER; note = Nucleotide with phosphorothioate linkage
  modified_base 16: mod_base = OTHER; note = 2'-O-methoxyethyl modified 5-methylcytosine
  modified_base 17: mod_base = OTHER; note = 2'-O-methoxyethyl modified nucleotide
  modified_base 18: mod_base = OTHER; note = 2'-O-methoxyethyl modified nucleotide
  modified_base 19: mod_base = OTHER; note = 2'-O-methoxyethyl modified nucleotide with phosphorothioate linkage
  modified_base 20: mod_base = OTHER; note = 2'-O-methoxyethyl modified 5-methylcytosine
  misc_feature 1..4: note = RNA
  misc_feature 5..15: note = DNA
  misc_feature 16..20: note = RNA
caaaactcattcgtgcaggc

SEQ ID NO: 492 - DNA, 20 bp, synthetic construct
  source 1..20: mol_type = other DNA
  modified_base 1: mod_base = OTHER; note = 2'-O-methoxyethyl modified nucleotide with phosphorothioate linkage
  modified_base 2: mod_base = OTHER; note = 2'-O-methoxyethyl modified nucleotide
  modified_base 3: mod_base = OTHER; note = 2'-O-methoxyethyl modified nucleotide
  modified_base 4: mod_base = OTHER; note = 2'-O-methoxyethyl modified 5-methylcytosine with phosphorothioate linkage
  modified_base 5: mod_base = OTHER; note = Nucleotide with phosphorothioate linkage
  modified_base 6: mod_base = OTHER; note = Nucleotide with phosphorothioate linkage
  modified_base 7: mod_base = OTHER; note = Nucleotide with phosphorothioate linkage
  modified_base 8: mod_base = OTHER; note = Nucleotide with phosphorothioate linkage
  modified_base 9: mod_base = OTHER; note = Nucleotide with phosphorothioate linkage
  modified_base 10: mod_base = OTHER; note = Nucleotide with phosphorothioate linkage
  modified_base 11: mod_base = OTHER; note = 5-methylcytosine with phosphorothioate linkage
  modified_base 12: mod_base = OTHER; note = Nucleotide with phosphorothioate linkage
  modified_base 13: mod_base = OTHER; note = 5-methylcytosine with phosphorothioate linkage
  modified_base 14: mod_base = OTHER; note = Nucleotide with phosphorothioate linkage
  modified_base 15: mod_base = OTHER; note = Nucleotide with phosphorothioate linkage
  modified_base 16: mod_base = OTHER; note = 2'-O-methoxyethyl modified nucleotide
  modified_base 17: mod_base = OTHER; note = 2'-O-methoxyethyl modified nucleotide
  modified_base 18: mod_base = OTHER; note = 2'-O-methoxyethyl modified 5-methylcytosine
  modified_base 19: mod_base = OTHER; note = 2'-O-methoxyethyl modified thymine with phosphorothioate linkage
  modified_base 20: mod_base = OTHER; note = 2'-O-methoxyethyl modified 5-methylcytosine
  misc_feature 1..4: note = RNA
  misc_feature 5..15: note = DNA
  misc_feature 16..20: note = RNA
ggacaggaagcacaaaactc

SEQ ID NO: 493 - DNA, 20 bp, synthetic construct
  source 1..20: mol_type = other DNA
  modified_base 1: mod_base = OTHER; note = 2'-O-methoxyethyl modified thymine with phosphorothioate linkage
  modified_base 2: mod_base = OTHER; note = 2'-O-methoxyethyl modified nucleotide
  modified_base 3: mod_base = OTHER; note = 2'-O-methoxyethyl modified 5-methylcytosine
  modified_base 4: mod_base = OTHER; note = 2'-O-methoxyethyl modified nucleotide with phosphorothioate linkage
  modified_base 5: mod_base = OTHER; note = Nucleotide with phosphorothioate linkage
  modified_base 6: mod_base = OTHER; note = Nucleotide with phosphorothioate linkage
  modified_base 7: mod_base = OTHER; note = Nucleotide with phosphorothioate linkage
  modified_base 8: mod_base = OTHER; note = Nucleotide with phosphorothioate linkage
  modified_base 9: mod_base = OTHER; note = Nucleotide with phosphorothioate linkage
  modified_base 10: mod_base = OTHER; note = 5-methylcytosine with phosphorothioate linkage
  modified_base 11: mod_base = OTHER; note = Nucleotide with phosphorothioate linkage
  modified_base 12: mod_base = OTHER; note = Nucleotide with phosphorothioate linkage
  modified_base 13: mod_base = OTHER; note = Nucleotide with phosphorothioate linkage
  modified_base 14: mod_base = OTHER; note = Nucleotide with phosphorothioate linkage
  modified_base 15: mod_base = OTHER; note = Nucleotide with phosphorothioate linkage
  modified_base 16: mod_base = OTHER; note = 2'-O-methoxyethyl modified nucleotide
  modified_base 17: mod_base = OTHER; note = 2'-O-methoxyethyl modified nucleotide
  modified_base 18: mod_base = OTHER; note = 2'-O-methoxyethyl modified nucleotide
  modified_base 19: mod_base = OTHER; note = 2'-O-methoxyethyl modified 5-methylcytosine with phosphorothioate linkage
  modified_base 20: mod_base = OTHER; note = 2'-O-methoxyethyl modified thymine
  misc_feature 1..4: note = RNA
  misc_feature 5..15: note = DNA
  misc_feature 16..20: note = RNA
tgcattaatcttataaagct

SEQ ID NO: 494 - DNA, 20 bp, synthetic construct
  source 1..20: mol_type = other DNA
  modified_base 1: mod_base = OTHER; note = 2'-O-methoxyethyl modified nucleotide with phosphorothioate linkage
  modified_base 2: mod_base = OTHER; note = 2'-O-methoxyethyl modified 5-methylcytosine
  modified_base 3: mod_base = OTHER; note = 2'-O-methoxyethyl modified thymine
  modified_base 4: mod_base = OTHER; note = 2'-O-methoxyethyl modified thymine with phosphorothioate linkage
  modified_base 5: mod_base = OTHER; note = Nucleotide with phosphorothioate linkage
  modified_base 6: mod_base = OTHER; note = 5-methylcytosine with phosphorothioate linkage
  modified_base 7: mod_base = OTHER; note = Nucleotide with phosphorothioate linkage
  modified_base 8: mod_base = OTHER; note = 5-methylcytosine with phosphorothioate linkage
  modified_base 9: mod_base = OTHER; note = 5-methylcytosine with phosphorothioate linkage
  modified_base 10: mod_base = OTHER; note = Nucleotide with phosphorothioate linkage
  modified_base 11: mod_base = OTHER; note = Nucleotide with phosphorothioate linkage
  modified_base 12: mod_base = OTHER; note = Nucleotide with phosphorothioate linkage
  modified_base 13: mod_base = OTHER; note = 5-methylcytosine with phosphorothioate linkage
  modified_base 14: mod_base = OTHER; note = Nucleotide with phosphorothioate linkage
  modified_base 15: mod_base = OTHER; note = Nucleotide with phosphorothioate linkage
  modified_base 16: mod_base = OTHER; note = 2'-O-methoxyethyl modified nucleotide
  modified_base 17: mod_base = OTHER; note = 2'-O-methoxyethyl modified nucleotide
  modified_base 18: mod_base = OTHER; note = 2'-O-methoxyethyl modified nucleotide
  modified_base 19: mod_base = OTHER; note = 2'-O-methoxyethyl modified nucleotide with phosphorothioate linkage
  modified_base 20: mod_base = OTHER; note = 2'-O-methoxyethyl modified nucleotide
  misc_feature 1..4: note = RNA
  misc_feature 5..15: note = DNA
  misc_feature 16..20: note = RNA
gcttgctcctttcttggagg

SEQ ID NO: 495 - DNA, 20 bp, synthetic construct
  source 1..20: mol_type = other DNA
  modified_base 1: mod_base = OTHER; note = 2'-O-methoxyethyl modified nucleotide with phosphorothioate linkage
  modified_base 2: mod_base = OTHER; note = 2'-O-methoxyethyl modified nucleotide
  modified_base 3: mod_base = OTHER; note = 2'-O-methoxyethyl modified 5-methylcytosine
  modified_base 4: mod_base = OTHER; note = 2'-O-methoxyethyl modified thymine with phosphorothioate linkage
  modified_base 5: mod_base = OTHER; note = Nucleotide with phosphorothioate linkage
  modified_base 6: mod_base = OTHER; note = Nucleotide with phosphorothioate linkage
  modified_base 7: mod_base = OTHER; note = 5-methylcytosine with phosphorothioate linkage
  modified_base 8: mod_base = OTHER; note = Nucleotide with phosphorothioate linkage
  modified_base 9: mod_base = OTHER; note = 5-methylcytosine with phosphorothioate linkage
  modified_base 10: mod_base = OTHER; note = 5-methylcytosine with phosphorothioate linkage
  modified_base 11: mod_base = OTHER; note = Nucleotide with phosphorothioate linkage
  modified_base 12: mod_base = OTHER; note = Nucleotide with phosphorothioate linkage
  modified_base 13: mod_base = OTHER; note = Nucleotide with phosphorothioate linkage
  modified_base 14: mod_base = OTHER; note = 5-methylcytosine with phosphorothioate linkage
  modified_base 15: mod_base = OTHER; note = Nucleotide with phosphorothioate linkage
  modified_base 16: mod_base = OTHER; note = 2'-O-methoxyethyl modified thymine
  modified_base 17: mod_base = OTHER; note = 2'-O-methoxyethyl modified nucleotide
  modified_base 18: mod_base = OTHER; note = 2'-O-methoxyethyl modified nucleotide
  modified_base 19: mod_base = OTHER; note = 2'-O-methoxyethyl modified nucleotide with phosphorothioate linkage
  modified_base 20: mod_base = OTHER; note = 2'-O-methoxyethyl modified nucleotide
  misc_feature 1..4: note = RNA
  misc_feature 5..15: note = DNA
  misc_feature 16..20: note = RNA
agcttgctcctttcttggag

SEQ ID NO: 496 - DNA, 20 bp, synthetic construct
  source 1..20: mol_type = other DNA
  modified_base 1: mod_base = OTHER; note = 2'-O-methoxyethyl modified nucleotide with phosphorothioate linkage
  modified_base 2: mod_base = OTHER; note = 2'-O-methoxyethyl modified nucleotide
  modified_base 3: mod_base = OTHER; note = 2'-O-methoxyethyl modified nucleotide
  modified_base 4: mod_base = OTHER; note = 2'-O-methoxyethyl modified 5-methylcytosine with phosphorothioate linkage
  modified_base 5: mod_base = OTHER; note = Nucleotide with phosphorothioate linkage
  modified_base 6: mod_base = OTHER; note = Nucleotide with phosphorothioate linkage
  modified_base 7: mod_base = OTHER; note = Nucleotide with phosphorothioate linkage
  modified_base 8: mod_base = OTHER; note = 5-methylcytosine with phosphorothioate linkage
  modified_base 9: mod_base = OTHER; note = Nucleotide with phosphorothioate linkage
  modified_base 10: mod_base = OTHER; note = 5-methylcytosine with phosphorothioate linkage
  modified_base 11: mod_base = OTHER; note = 5-methylcytosine with phosphorothioate linkage
  modified_base 12: mod_base = OTHER; note = Nucleotide with phosphorothioate linkage
  modified_base 13: mod_base = OTHER; note = Nucleotide with phosphorothioate linkage
  modified_base 14: mod_base = OTHER; note = Nucleotide with phosphorothioate linkage
  modified_base 15: mod_base = OTHER; note = 5-methylcytosine with phosphorothioate linkage
  modified_base 16: mod_base = OTHER; note = 2'-O-methoxyethyl modified thymine
  modified_base 17: mod_base = OTHER; note = 2'-O-methoxyethyl modified thymine
  modified_base 18: mod_base = OTHER; note = 2'-O-methoxyethyl modified nucleotide
  modified_base 19: mod_base = OTHER; note = 2'-O-methoxyethyl modified nucleotide with phosphorothioate linkage
  modified_base 20: mod_base = OTHER; note = 2'-O-methoxyethyl modified nucleotide
  misc_feature 1..4: note = RNA
  misc_feature 5..15: note = DNA
  misc_feature 16..20: note = RNA
gagcttgctcctttcttgga

SEQ ID NO: 497 - DNA, 20 bp, synthetic construct
  source 1..20: mol_type = other DNA
  modified_base 1: mod_base = OTHER; note = 2'-O-methoxyethyl modified thymine with phosphorothioate linkage
  modified_base 2: mod_base = OTHER; note = 2'-O-methoxyethyl modified nucleotide
  modified_base 3: mod_base = OTHER; note = 2'-O-methoxyethyl modified nucleotide
  modified_base 4: mod_base = OTHER; note = 2'-O-methoxyethyl modified nucleotide with phosphorothioate linkage
  modified_base 5: mod_base = OTHER; note = 5-methylcytosine with phosphorothioate linkage
  modified_base 6: mod_base = OTHER; note = Nucleotide with phosphorothioate linkage
  modified_base 7: mod_base = OTHER; note = Nucleotide with phosphorothioate linkage
  modified_base 8: mod_base = OTHER; note = Nucleotide with phosphorothioate linkage
  modified_base 9: mod_base = OTHER; note = 5-methylcytosine with phosphorothioate linkage
  modified_base 10: mod_base = OTHER; note = Nucleotide with phosphorothioate linkage
  modified_base 11: mod_base = OTHER; note = 5-methylcytosine with phosphorothioate linkage
  modified_base 12: mod_base = OTHER; note = 5-methylcytosine with phosphorothioate linkage
  modified_base 13: mod_base = OTHER; note = Nucleotide with phosphorothioate linkage
  modified_base 14: mod_base = OTHER; note = Nucleotide with phosphorothioate linkage
  modified_base 15: mod_base = OTHER; note = Nucleotide with phosphorothioate linkage
  modified_base 16: mod_base = OTHER; note = 2'-O-methoxyethyl modified 5-methylcytosine
  modified_base 17: mod_base = OTHER; note = 2'-O-methoxyethyl modified thymine
  modified_base 18: mod_base = OTHER; note = 2'-O-methoxyethyl modified thymine
  modified_base 19: mod_base = OTHER; note = 2'-O-methoxyethyl modified nucleotide with phosphorothioate linkage
  modified_base 20: mod_base = OTHER; note = 2'-O-methoxyethyl modified nucleotide
  misc_feature 1..4: note = RNA
  misc_feature 5..15: note = DNA
  misc_feature 16..20: note = RNA
tgagcttgctcctttcttgg

SEQ ID NO: 498 - DNA, 20 bp, synthetic construct
  source 1..20: mol_type = other DNA
  modified_base 1: mod_base = OTHER; note = 2'-O-methoxyethyl modified 5-methylcytosine with phosphorothioate linkage
  modified_base 2: mod_base = OTHER; note = 2'-O-methoxyethyl modified thymine
  modified_base 3: mod_base = OTHER; note = 2'-O-methoxyethyl modified nucleotide
  modified_base 4: mod_base = OTHER; note = 2'-O-methoxyethyl modified nucleotide with phosphorothioate linkage
  modified_base 5: mod_base = OTHER; note = Nucleotide with phosphorothioate linkage
  modified_base 6: mod_base = OTHER; note = 5-methylcytosine with phosphorothioate linkage
  modified_base 7: mod_base = OTHER; note = Nucleotide with phosphorothioate linkage
  modified_base 8: mod_base = OTHER; note = Nucleotide with phosphorothioate linkage
  modified_base 9: mod_base = OTHER; note = Nucleotide with phosphorothioate linkage
  modified_base 10: mod_base = OTHER; note = 5-methylcytosine with phosphorothioate linkage
  modified_base 11: mod_base = OTHER; note = Nucleotide with phosphorothioate linkage
  modified_base 12: mod_base = OTHER; note = 5-methylcytosine with phosphorothioate linkage
  modified_base 13: mod_base = OTHER; note = 5-methylcytosine with phosphorothioate linkage
  modified_base 14: mod_base = OTHER; note = Nucleotide with phosphorothioate linkage
  modified_base 15: mod_base = OTHER; note = Nucleotide with phosphorothioate linkage
  modified_base 16: mod_base = OTHER; note = 2'-O-methoxyethyl modified thymine
  modified_base 17: mod_base = OTHER; note = 2'-O-methoxyethyl modified 5-methylcytosine
  modified_base 18: mod_base = OTHER; note = 2'-O-methoxyethyl modified thymine
  modified_base 19: mod_base = OTHER; note = 2'-O-methoxyethyl modified thymine with phosphorothioate linkage
  modified_base 20: mod_base = OTHER; note = 2'-O-methoxyethyl modified nucleotide
  misc_feature 1..4: note = RNA
  misc_feature 5..15: note = DNA
  misc_feature 16..20: note = RNA
ctgagcttgctcctttcttg

SEQ ID NO: 499 - DNA, 20 bp, synthetic construct
  source 1..20: mol_type = other DNA
  modified_base 1: mod_base = OTHER; note = 2'-O-methoxyethyl modified nucleotide with phosphorothioate linkage
  modified_base 2: mod_base = OTHER; note = 2'-O-methoxyethyl modified 5-methylcytosine
  modified_base 3: mod_base = OTHER; note = 2'-O-methoxyethyl modified thymine
  modified_base 4: mod_base = OTHER; note = 2'-O-methoxyethyl modified nucleotide with phosphorothioate linkage
  modified_base 5: mod_base = OTHER; note = Nucleotide with phosphorothioate linkage
  modified_base 6: mod_base = OTHER; note = Nucleotide with phosphorothioate linkage
  modified_base 7: mod_base = OTHER; note = 5-methylcytosine with phosphorothioate linkage
  modified_base 8: mod_base = OTHER; note = Nucleotide with phosphorothioate linkage
  modified_base 9: mod_base = OTHER; note = Nucleotide with phosphorothioate linkage
  modified_base 10: mod_base = OTHER; note = Nucleotide with phosphorothioate linkage
  modified_base 11: mod_base = OTHER; note = 5-methylcytosine with phosphorothioate linkage
  modified_base 12: mod_base = OTHER; note = Nucleotide with phosphorothioate linkage
  modified_base 13: mod_base = OTHER; note = 5-methylcytosine with phosphorothioate linkage
  modified_base 14: mod_base = OTHER; note = 5-methylcytosine with phosphorothioate linkage
  modified_base 15: mod_base = OTHER; note = Nucleotide with phosphorothioate linkage
  modified_base 16: mod_base = OTHER; note = 2'-O-methoxyethyl modified thymine
  modified_base 17: mod_base = OTHER; note = 2'-O-methoxyethyl modified thymine
  modified_base 18: mod_base = OTHER; note = 2'-O-methoxyethyl modified 5-methylcytosine
  modified_base 19: mod_base = OTHER; note = 2'-O-methoxyethyl modified thymine with phosphorothioate linkage
  modified_base 20: mod_base = OTHER; note = 2'-O-methoxyethyl modified thymine
  misc_feature 1..4: note = RNA
  misc_feature 5..15: note = DNA
  misc_feature 16..20: note = RNA
gctgagcttgctcctttctt

SEQ ID NO: 500 - DNA, 20 bp, synthetic construct
  source 1..20: mol_type = other DNA
  modified_base 1: mod_base = OTHER; note = 2'-O-methoxyethyl modified nucleotide with phosphorothioate linkage
  modified_base 2: mod_base = OTHER; note = 2'-O-methoxyethyl modified nucleotide
  modified_base 3: mod_base = OTHER; note = 2'-O-methoxyethyl modified 5-methylcytosine
  modified_base 4: mod_base = OTHER; note = 2'-O-methoxyethyl modified thymine with phosphorothioate linkage
  modified_base 5: mod_base = OTHER; note = Nucleotide with phosphorothioate linkage
  modified_base 6: mod_base = OTHER; note = Nucleotide with phosphorothioate linkage
  modified_base 7: mod_base = OTHER; note = Nucleotide with phosphorothioate linkage
  modified_base 8: mod_base = OTHER; note = 5-methylcytosine with phosphorothioate linkage
  modified_base 9: mod_base = OTHER; note = Nucleotide with phosphorothioate linkage
  modified_base 10: mod_base = OTHER; note = Nucleotide with phosphorothioate linkage
  modified_base 11: mod_base = OTHER; note = Nucleotide with phosphorothioate linkage
  modified_base 12: mod_base = OTHER; note = 5-methylcytosine with phosphorothioate linkage
  modified_base 13: mod_base = OTHER; note = Nucleotide with phosphorothioate linkage
  modified_base 14: mod_base = OTHER; note = 5-methylcytosine with phosphorothioate linkage
  modified_base 15: mod_base = OTHER; note = 5-methylcytosine with phosphorothioate linkage
  modified_base 16: mod_base = OTHER; note = 2'-O-methoxyethyl modified thymine
  modified_base 17: mod_base = OTHER; note = 2'-O-methoxyethyl modified thymine
  modified_base 18: mod_base = OTHER; note = 2'-O-methoxyethyl modified thymine
  modified_base 19: mod_base = OTHER; note = 2'-O-methoxyethyl modified 5-methylcytosine with phosphorothioate linkage
  modified_base 20: mod_base = OTHER; note = 2'-O-methoxyethyl modified thymine
  misc_feature 1..4: note = RNA
  misc_feature 5..15: note = DNA
  misc_feature 16..20: note = RNA
agctgagcttgctcctttct

SEQ ID NO: 501 - DNA, 20 bp, synthetic construct
  source 1..20: mol_type = other DNA
  modified_base 1: mod_base = OTHER; note = 2'-O-methoxyethyl modified nucleotide with phosphorothioate linkage
  modified_base 2: mod_base = OTHER; note = 2'-O-methoxyethyl modified nucleotide
  modified_base 3: mod_base = OTHER; note = 2'-O-methoxyethyl modified nucleotide
  modified_base 4: mod_base = OTHER; note = 2'-O-methoxyethyl modified 5-methylcytosine with phosphorothioate linkage
  modified_base 5: mod_base = OTHER; note = Nucleotide with phosphorothioate linkage
  modified_base 6: mod_base = OTHER; note = Nucleotide with phosphorothioate linkage
  modified_base 7: mod_base = OTHER; note = Nucleotide with phosphorothioate linkage
  modified_base 8: mod_base = OTHER; note = Nucleotide with phosphorothioate linkage
  modified_base 9: mod_base = OTHER; note = 5-methylcytosine with phosphorothioate linkage
  modified_base 10: mod_base = OTHER; note = Nucleotide with phosphorothioate linkage
  modified_base 11: mod_base = OTHER; note = Nucleotide with phosphorothioate linkage
  modified_base 12: mod_base = OTHER; note = Nucleotide with phosphorothioate linkage
  modified_base 13: mod_base = OTHER; note = 5-methylcytosine with phosphorothioate linkage
  modified_base 14: mod_base = OTHER; note = Nucleotide with phosphorothioate linkage
  modified_base 15: mod_base = OTHER; note = 5-methylcytosine with phosphorothioate linkage
  modified_base 16: mod_base = OTHER; note = 2'-O-methoxyethyl modified 5-methylcytosine
  modified_base 17: mod_base = OTHER; note = 2'-O-methoxyethyl modified thymine
  modified_base 18: mod_base = OTHER; note = 2'-O-methoxyethyl modified thymine
  modified_base 19: mod_base = OTHER; note = 2'-O-methoxyethyl modified thymine with phosphorothioate linkage
  modified_base 20: mod_base = OTHER; note = 2'-O-methoxyethyl modified 5-methylcytosine
  misc_feature 1..4: note = RNA
  misc_feature 5..15: note = DNA
  misc_feature 16..20: note = RNA
aagctgagcttgctcctttc

SEQ ID NO: 502 - DNA, 20 bp, synthetic construct
  source 1..20: mol_type = other DNA
  modified_base 1: mod_base = OTHER; note = 2'-O-methoxyethyl modified nucleotide with phosphorothioate linkage
  modified_base 2: mod_base = OTHER; note = 2'-O-methoxyethyl modified thymine
  modified_base 3: mod_base = OTHER; note = 2'-O-methoxyethyl modified nucleotide
  modified_base 4: mod_base = OTHER; note = 2'-O-methoxyethyl modified nucleotide with phosphorothioate linkage
  modified_base 5: mod_base = OTHER; note = Nucleotide with phosphorothioate linkage
  modified_base 6: mod_base = OTHER; note = 5-methylcytosine with phosphorothioate linkage
  modified_base 7: mod_base = OTHER; note = Nucleotide with phosphorothioate linkage
  modified_base 8: mod_base = OTHER; note = Nucleotide with phosphorothioate linkage
  modified_base 9: mod_base = OTHER; note = Nucleotide with phosphorothioate linkage
  modified_base 10: mod_base = OTHER; note = Nucleotide with phosphorothioate linkage
  modified_base 11: mod_base = OTHER; note = 5-methylcytosine with phosphorothioate linkage
  modified_base 12: mod_base = OTHER; note = Nucleotide with phosphorothioate linkage
  modified_base 13: mod_base = OTHER; note = Nucleotide with phosphorothioate linkage
  modified_base 14: mod_base = OTHER; note = Nucleotide with phosphorothioate linkage
  modified_base 15: mod_base = OTHER; note = 5-methylcytosine with phosphorothioate linkage
  modified_base 16: mod_base = OTHER; note = 2'-O-methoxyethyl modified thymine
  modified_base 17: mod_base = OTHER; note = 2'-O-methoxyethyl modified 5-methylcytosine
  modified_base 18: mod_base = OTHER; note = 2'-O-methoxyethyl modified 5-methylcytosine
  modified_base 19: mod_base = OTHER; note = 2'-O-methoxyethyl modified thymine with phosphorothioate linkage
  modified_base 20: mod_base = OTHER; note = 2'-O-methoxyethyl modified thymine
  misc_feature 1..4: note = RNA
  misc_feature 5..15: note = DNA
  misc_feature 16..20: note = RNA
gtaagctgagcttgctcctt

SEQ ID NO: 503 - DNA, 20 bp, synthetic construct
  source 1..20: mol_type = other DNA
  modified_base 1: mod_base = OTHER; note = 2'-O-methoxyethyl modified nucleotide with phosphorothioate linkage
  modified_base 2: mod_base = OTHER; note = 2'-O-methoxyethyl modified nucleotide
  modified_base 3: mod_base = OTHER; note = 2'-O-methoxyethyl modified thymine
  modified_base 4: mod_base = OTHER; note = 2'-O-methoxyethyl modified nucleotide with phosphorothioate linkage
  modified_base 5: mod_base = OTHER; note = Nucleotide with phosphorothioate linkage
  modified_base 6: mod_base = OTHER; note = Nucleotide with phosphorothioate linkage
  modified_base 7: mod_base = OTHER; note = 5-methylcytosine with phosphorothioate linkage
  modified_base 8: mod_base = OTHER; note = Nucleotide with phosphorothioate linkage
  modified_base 9: mod_base = OTHER; note = Nucleotide with phosphorothioate linkage
  modified_base 10: mod_base = OTHER; note = Nucleotide with phosphorothioate linkage
  modified_base 11: mod_base = OTHER; note = Nucleotide with phosphorothioate linkage
  modified_base 12: mod_base = OTHER; note = 5-methylcytosine with phosphorothioate linkage
  modified_base 13: mod_base = OTHER; note = Nucleotide with phosphorothioate linkage
  modified_base 14: mod_base = OTHER; note = Nucleotide with phosphorothioate linkage
  modified_base 15: mod_base = OTHER; note = Nucleotide with phosphorothioate linkage
  modified_base 16: mod_base = OTHER; note = 2'-O-methoxyethyl modified 5-methylcytosine
  modified_base 17: mod_base = OTHER; note = 2'-O-methoxyethyl modified thymine
  modified_base 18: mod_base = OTHER; note = 2'-O-methoxyethyl modified 5-methylcytosine
  modified_base 19: mod_base = OTHER; note = 2'-O-methoxyethyl modified 5-methylcytosine with phosphorothioate linkage
  modified_base 20: mod_base = OTHER; note = 2'-O-methoxyethyl modified thymine
  misc_feature 1..4: note = RNA
  misc_feature 5..15: note = DNA
  misc_feature 16..20: note = RNA
ggtaagctgagcttgctcct

SEQ ID NO: 504 - DNA, 20 bp, synthetic construct
  source 1..20: mol_type = other DNA
  modified_base 1: mod_base = OTHER; note = 2'-O-methoxyethyl modified nucleotide with phosphorothioate linkage
  modified_base 2: mod_base = OTHER; note = 2'-O-methoxyethyl modified nucleotide
  modified_base 3: mod_base = OTHER; note = 2'-O-methoxyethyl modified nucleotide
  modified_base 4: mod_base = OTHER; note = 2'-O-methoxyethyl modified thymine with phosphorothioate linkage
  modified_base 5: mod_base = OTHER; note = Nucleotide with phosphorothioate linkage
  modified_base 6: mod_base = OTHER; note = Nucleotide with phosphorothioate linkage
  modified_base 7: mod_base = OTHER; note = Nucleotide with phosphorothioate linkage
  modified_base 8: mod_base = OTHER; note = 5-methylcytosine with phosphorothioate linkage
  modified_base 9: mod_base = OTHER; note = Nucleotide with phosphorothioate linkage
  modified_base 10: mod_base = OTHER; note = Nucleotide with phosphorothioate linkage
  modified_base 11: mod_base = OTHER; note = Nucleotide with phosphorothioate linkage
  modified_base 12: mod_base = OTHER; note = Nucleotide with phosphorothioate linkage
  modified_base 13: mod_base = OTHER; note = 5-methylcytosine with phosphorothioate linkage
  modified_base 14: mod_base = OTHER; note = Nucleotide with phosphorothioate linkage
  modified_base 15: mod_base = OTHER; note = Nucleotide with phosphorothioate linkage
  modified_base 16: mod_base = OTHER; note = 2'-O-methoxyethyl modified nucleotide
  modified_base 17: mod_base = OTHER; note = 2'-O-methoxyethyl modified 5-methylcytosine
  modified_base 18: mod_base = OTHER; note = 2'-O-methoxyethyl modified thymine
  modified_base 19: mod_base = OTHER; note = 2'-O-methoxyethyl modified 5-methylcytosine with phosphorothioate linkage
  modified_base 20: mod_base = OTHER; note = 2'-O-methoxyethyl modified 5-methylcytosine
  misc_feature 1..4: note = RNA
  misc_feature 5..15: note = DNA
  misc_feature 16..20: note = RNA
aggtaagctgagcttgctcc

SEQ ID NO: 505 - DNA, 20 bp, synthetic construct
  source 1..20: mol_type = other DNA
  modified_base 1: mod_base = OTHER; note = 2'-O-methoxyethyl modified nucleotide with phosphorothioate linkage
  modified_base 2: mod_base = OTHER; note = 2'-O-methoxyethyl modified nucleotide
  modified_base 3: mod_base = OTHER; note = 2'-O-methoxyethyl modified nucleotide
  modified_base 4: mod_base = OTHER; note = 2'-O-methoxyethyl modified nucleotide with phosphorothioate linkage
  modified_base 5: mod_base = OTHER; note = Nucleotide with phosphorothioate linkage
  modified_base 6: mod_base = OTHER; note = Nucleotide with phosphorothioate linkage
  modified_base 7: mod_base = OTHER; note = Nucleotide with phosphorothioate linkage
  modified_base 8: mod_base = OTHER; note = Nucleotide with phosphorothioate linkage
  modified_base 9: mod_base = OTHER; note = 5-methylcytosine with phosphorothioate linkage
  modified_base 10: mod_base = OTHER; note = Nucleotide with phosphorothioate linkage
  modified_base 11: mod_base = OTHER; note = Nucleotide with phosphorothioate linkage
  modified_base 12: mod_base = OTHER; note = Nucleotide with phosphorothioate linkage
  modified_base 13: mod_base = OTHER; note = Nucleotide with phosphorothioate linkage
  modified_base 14: mod_base = OTHER; note = 5-methylcytosine with phosphorothioate linkage
  modified_base 15: mod_base = OTHER; note = Nucleotide with phosphorothioate linkage
  modified_base 16: mod_base = OTHER; note = 2'-O-methoxyethyl modified thymine
  modified_base 17: mod_base = OTHER; note = 2'-O-methoxyethyl modified nucleotide
  modified_base 18: mod_base = OTHER; note = 2'-O-methoxyethyl modified 5-methylcytosine
  modified_base 19: mod_base = OTHER; note = 2'-O-methoxyethyl modified thymine with phosphorothioate linkage
  modified_base 20: mod_base = OTHER; note = 2'-O-methoxyethyl modified 5-methylcytosine
  misc_feature 1..4: note = RNA
  misc_feature 5..15: note = DNA
  misc_feature 16..20: note = RNA
aaggtaagctgagcttgctc

SEQ ID NO: 506 - DNA, 20 bp, synthetic construct
  source 1..20: mol_type = other DNA
  modified_base 1: mod_base = OTHER; note = 2'-O-methoxyethyl modified 5-methylcytosine with phosphorothioate linkage
  modified_base 2: mod_base = OTHER; note = 2'-O-methoxyethyl modified nucleotide
  modified_base 3: mod_base = OTHER; note = 2'-O-methoxyethyl modified nucleotide
  modified_base 4: mod_base = OTHER; note = 2'-O-methoxyethyl modified nucleotide with phosphorothioate linkage
  modified_base 5: mod_base = OTHER; note = Nucleotide with phosphorothioate linkage
  modified_base 6: mod_base = OTHER; note = Nucleotide with phosphorothioate linkage
  modified_base 7: mod_base = OTHER; note = Nucleotide with phosphorothioate linkage
  modified_base 8: mod_base = OTHER; note = Nucleotide with phosphorothioate linkage
  modified_base 9: mod_base = OTHER; note = Nucleotide with phosphorothioate linkage
  modified_base 10: mod_base = OTHER; note = 5-methylcytosine with phosphorothioate linkage
  modified_base 11: mod_base = OTHER; note = Nucleotide with phosphorothioate linkage
  modified_base 12: mod_base = OTHER; note = Nucleotide with phosphorothioate linkage
  modified_base 13: mod_base = OTHER; note = Nucleotide with phosphorothioate linkage
  modified_base 14: mod_base = OTHER; note = Nucleotide with phosphorothioate linkage
  modified_base 15: mod_base = OTHER; note = 5-methylcytosine with phosphorothioate linkage
  modified_base 16: mod_base = OTHER; note = 2'-O-methoxyethyl modified thymine
  modified_base 17: mod_base = OTHER; note = 2'-O-methoxyethyl modified thymine
  modified_base 18: mod_base = OTHER; note = 2'-O-methoxyethyl modified nucleotide
  modified_base 19: mod_base = OTHER; note = 2'-O-methoxyethyl modified 5-methylcytosine with phosphorothioate linkage
  modified_base 20: mod_base = OTHER; note = 2'-O-methoxyethyl modified thymine
  misc_feature 1..4: note = RNA
  misc_feature 5..15: note = DNA
  misc_feature 16..20: note = RNA
caaggtaagctgagcttgct

SEQ ID NO: 507 - DNA, 20 bp, synthetic construct
  source 1..20: mol_type = other DNA
  modified_base 1: mod_base = OTHER; note = 2'-O-methoxyethyl modified thymine with phosphorothioate linkage
  modified_base 2: mod_base = OTHER; note = 2'-O-methoxyethyl modified 5-methylcytosine
  modified_base 3: mod_base = OTHER; note = 2'-O-methoxyethyl modified nucleotide
  modified_base 4: mod_base = OTHER; note = 2'-O-methoxyethyl modified nucleotide with phosphorothioate linkage
  modified_base 5: mod_base = OTHER; note = Nucleotide with phosphorothioate linkage
  modified_base 6: mod_base = OTHER; note = Nucleotide with phosphorothioate linkage
  modified_base 7: mod_base = OTHER; note = Nucleotide with phosphorothioate linkage
  modified_base 8: mod_base = OTHER; note = Nucleotide with phosphorothioate linkage
  modified_base 9: mod_base = OTHER; note = Nucleotide with phosphorothioate linkage
  modified_base 10: mod_base = OTHER; note = Nucleotide with phosphorothioate linkage
  modified_base 11: mod_base = OTHER; note = 5-methylcytosine with phosphorothioate linkage
  modified_base 12: mod_base = OTHER; note = Nucleotide with phosphorothioate linkage
  modified_base 13: mod_base = OTHER; note = Nucleotide with phosphorothioate linkage
  modified_base 14: mod_base = OTHER; note = Nucleotide with phosphorothioate linkage
  modified_base 15: mod_base = OTHER; note = Nucleotide with phosphorothioate linkage
  modified_base 16: mod_base = OTHER; note = 2'-O-methoxyethyl modified 5-methylcytosine
  modified_base 17: mod_base = OTHER; note = 2'-O-methoxyethyl modified thymine
  modified_base 18: mod_base = OTHER; note = 2'-O-methoxyethyl modified thymine
  modified_base 19: mod_base = OTHER; note = 2'-O-methoxyethyl modified nucleotide with phosphorothioate linkage
  modified_base 20: mod_base = OTHER; note = 2'-O-methoxyethyl modified 5-methylcytosine
  misc_feature 1..4: note = RNA
  misc_feature 5..15: note = DNA
  misc_feature 16..20: note = RNA
tcaaggtaagctgagcttgc

SEQ ID NO: 508 - DNA, 20 bp, synthetic construct
  source 1..20: mol_type = other DNA
  modified_base 1: mod_base = OTHER; note = 2'-O-methoxyethyl modified 5-methylcytosine with phosphorothioate linkage
  modified_base 2: mod_base = OTHER; note = 2'-O-methoxyethyl modified nucleotide
  modified_base 3: mod_base = OTHER; note = 2'-O-methoxyethyl modified 5-methylcytosine
  modified_base 4: mod_base = OTHER; note = 2'-O-methoxyethyl modified 5-methylcytosine with phosphorothioate linkage
  modified_base 5: mod_base = OTHER; note = Nucleotide with phosphorothioate linkage
  modified_base 6: mod_base = OTHER; note = Nucleotide with phosphorothioate linkage
  modified_base 7: mod_base = OTHER; note = Nucleotide with phosphorothioate linkage
  modified_base 8: mod_base = OTHER; note = 5-methylcytosine with phosphorothioate linkage
  modified_base 9: mod_base = OTHER; note = Nucleotide with phosphorothioate linkage
  modified_base 10: mod_base = OTHER; note = Nucleotide with phosphorothioate linkage
  modified_base 11: mod_base = OTHER; note = Nucleotide with phosphorothioate linkage
  modified_base 12: mod_base = OTHER; note = Nucleotide with phosphorothioate linkage
  modified_base 13: mod_base = OTHER; note = Nucleotide with phosphorothioate linkage
  modified_base 14: mod_base = OTHER; note = 5-methylcytosine with phosphorothioate linkage
  modified_base 15: mod_base = OTHER; note = Nucleotide with phosphorothioate linkage
  modified_base 16: mod_base = OTHER; note = 2'-O-methoxyethyl modified 5-methylcytosine
  modified_base 17: mod_base = OTHER; note = 2'-O-methoxyethyl modified nucleotide
  modified_base 18: mod_base = OTHER; note = 2'-O-methoxyethyl modified nucleotide
  modified_base 19: mod_base = OTHER; note = 2'-O-methoxyethyl modified nucleotide with phosphorothioate linkage
  modified_base 20: mod_base = OTHER; note = 2'-O-methoxyethyl modified nucleotide
  misc_feature 1..4: note = RNA
  misc_feature 5..15: note = DNA
  misc_feature 16..20: note = RNA
cacctttcgagttctcaagg

SEQ ID NO: 509 - DNA, 20 bp, synthetic construct
  source 1..20: mol_type = other DNA
  modified_base 1: mod_base = OTHER; note = 2'-O-methoxyethyl modified nucleotide with phosphorothioate linkage
  modified_base 2: mod_base = OTHER; note = 2'-O-methoxyethyl modified 5-methylcytosine
  modified_base 3: mod_base = OTHER; note = 2'-O-methoxyethyl modified nucleotide
  modified_base 4: mod_base = OTHER; note = 2'-O-methoxyethyl modified 5-methylcytosine with phosphorothioate linkage
  modified_base 5: mod_base = OTHER; note = 5-methylcytosine with phosphorothioate linkage
  modified_base 6: mod_base = OTHER; note = Nucleotide with phosphorothioate linkage
  modified_base 7: mod_base = OTHER; note = Nucleotide with phosphorothioate linkage
  modified_base 8: mod_base = OTHER; note = Nucleotide with phosphorothioate linkage
  modified_base 9: mod_base = OTHER; note = 5-methylcytosine with phosphorothioate linkage
  modified_base 10: mod_base = OTHER; note = Nucleotide with phosphorothioate linkage
  modified_base 11: mod_base = OTHER; note = Nucleotide with phosphorothioate linkage
  modified_base 12: mod_base = OTHER; note = Nucleotide with phosphorothioate linkage
  modified_base 13: mod_base = OTHER; note = Nucleotide with phosphorothioate linkage
  modified_base 14: mod_base = OTHER; note = Nucleotide with phosphorothioate linkage
  modified_base 15: mod_base = OTHER; note = 5-methylcytosine with phosphorothioate linkage
  modified_base 16: mod_base = OTHER; note = 2'-O-methoxyethyl modified thymine
  modified_base 17: mod_base = OTHER; note = 2'-O-methoxyethyl modified 5-methylcytosine
  modified_base 18: mod_base = OTHER; note = 2'-O-methoxyethyl modified nucleotide
  modified_base 19: mod_base = OTHER; note = 2'-O-methoxyethyl modified nucleotide with phosphorothioate linkage
  modified_base 20: mod_base = OTHER; note = 2'-O-methoxyethyl modified nucleotide
  misc_feature 1..4: note = RNA
  misc_feature 5..15: note = DNA
  misc_feature 16..20: note = RNA
gcacctttcgagttctcaag

SEQ ID NO: 510 - DNA, 20 bp, synthetic construct
  source 1..20: mol_type = other DNA
  modified_base 1: mod_base = OTHER; note = 2'-O-methoxyethyl modified nucleotide with phosphorothioate linkage
  modified_base 2: mod_base = OTHER; note = 2'-O-methoxyethyl modified nucleotide
  modified_base 3: mod_base = OTHER; note = 2'-O-methoxyethyl modified nucleotide
  modified_base 4: mod_base = OTHER; note = 2'-O-methoxyethyl modified thymine with phosphorothioate linkage
  modified_base 5: mod_base = OTHER; note = 5-methylcytosine with phosphorothioate linkage
  modified_base 6: mod_base = OTHER; note = Nucleotide with phosphorothioate linkage
  modified_base 7: mod_base = OTHER; note = 5-methylcytosine with phosphorothioate linkage
  modified_base 8: mod_base = OTHER; note = Nucleotide with phosphorothioate linkage
  modified_base 9: mod_base = OTHER; note = Nucleotide with phosphorothioate linkage
  modified_base 10: mod_base = OTHER; note = 5-methylcytosine with phosphorothioate linkage
  modified_base 11: mod_base = OTHER; note = Nucleotide with phosphorothioate linkage
  modified_base 12: mod_base = OTHER; note = Nucleotide with phosphorothioate linkage
  modified_base 13: mod_base = OTHER; note = Nucleotide with phosphorothioate linkage
  modified_base 14: mod_base = OTHER; note = Nucleotide with phosphorothioate linkage
  modified_base 15: mod_base = OTHER; note = Nucleotide with phosphorothioate linkage
  modified_base 16: mod_base = OTHER; note = 2'-O-methoxyethyl modified nucleotide
  modified_base 17: mod_base = OTHER; note = 2'-O-methoxyethyl modified nucleotide
  modified_base 18: mod_base = OTHER; note = 2'-O-methoxyethyl modified thymine
  modified_base 19: mod_base = OTHER; note = 2'-O-methoxyethyl modified 5-methylcytosine with phosphorothioate linkage
  modified_base 20: mod_base = OTHER; note = 2'-O-methoxyethyl modified nucleotide
  misc_feature 1..4: note = RNA
  misc_feature 5..15: note = DNA
  misc_feature 16..20: note = RNA
aagtcacatctagaaaatca

SEQ ID NO: 511 - DNA, 20 bp, synthetic construct
  source 1..20: mol_type = other DNA
  modified_base 1: mod_base = OTHER; note = 2'-O-methoxyethyl modified thymine with phosphorothioate linkage
  modified_base 2: mod_base = OTHER; note = 2'-O-methoxyethyl modified 5-methylcytosine
  modified_base 3: mod_base = OTHER; note = 2'-O-methoxyethyl modified thymine
  modified_base 4: mod_base = OTHER; note = 2'-O-methoxyethyl modified 5-methylcytosine with phosphorothioate linkage
  modified_base 5: mod_base = OTHER; note = Nucleotide with phosphorothioate linkage
  modified_base 6: mod_base = OTHER; note = Nucleotide with phosphorothioate linkage
  modified_base 7: mod_base = OTHER; note = 5-methylcytosine with phosphorothioate linkage
  modified_base 8: mod_base = OTHER; note = Nucleotide with phosphorothioate linkage
  modified_base 9: mod_base = OTHER; note = Nucleotide with phosphorothioate linkage
  modified_base 10: mod_base = OTHER; note = Nucleotide with phosphorothioate linkage
  modified_base 11: mod_base = OTHER; note = Nucleotide with phosphorothioate linkage
  modified_base 12: mod_base = OTHER; note = Nucleotide with phosphorothioate linkage
  modified_base 13: mod_base = OTHER; note = Nucleotide with phosphorothioate linkage
  modified_base 14: mod_base = OTHER; note = 5-methylcytosine with phosphorothioate linkage
  modified_base 15: mod_base = OTHER; note = Nucleotide with phosphorothioate linkage
  modified_base 16: mod_base = OTHER; note = 2'-O-methoxyethyl modified nucleotide
  modified_base 17: mod_base = OTHER; note = 2'-O-methoxyethyl modified nucleotide
  modified_base 18: mod_base = OTHER; note = 2'-O-methoxyethyl modified nucleotide
  modified_base 19: mod_base = OTHER; note = 2'-O-methoxyethyl modified nucleotide with phosphorothioate linkage
  modified_base 20: mod_base = OTHER; note = 2'-O-methoxyethyl modified thymine
  misc_feature 1..4: note = RNA
  misc_feature 5..15: note = DNA
  misc_feature 16..20: note = RNA
tctctacataattcaagaat

SEQ ID NO: 512 - DNA, 20 bp, synthetic construct
  source 1..20: mol_type = other DNA
  modified_base 1: mod_base = OTHER; note = 2'-O-methoxyethyl modified nucleotide with phosphorothioate linkage
  modified_base 2: mod_base = OTHER; note = 2'-O-methoxyethyl modified nucleotide
  modified_base 3: mod_base = OTHER; note = 2'-O-methoxyethyl modified nucleotide
  modified_base 4: mod_base = OTHER; note = 2'-O-methoxyethyl modified nucleotide with phosphorothioate linkage
  modified_base 5: mod_base = OTHER; note = Nucleotide with phosphorothioate linkage
  modified_base 6: mod_base = OTHER; note = Nucleotide with phosphorothioate linkage
  modified_base 7: mod_base = OTHER; note = Nucleotide with phosphorothioate linkage
  modified_base 8: mod_base = OTHER; note = 5-methylcytosine with phosphorothioate linkage
  modified_base 9: mod_base = OTHER; note = Nucleotide with phosphorothioate linkage
  modified_base 10: mod_base = OTHER; note = 5-methylcytosine with phosphorothioate linkage
  modified_base 11: mod_base = OTHER; note = Nucleotide with phosphorothioate linkage
  modified_base 12: mod_base = OTHER; note = Nucleotide with phosphorothioate linkage
  modified_base 13: mod_base = OTHER; note = 5-methylcytosine with phosphorothioate linkage
  modified_base 14: mod_base = OTHER; note = 5-methylcytosine with phosphorothioate linkage
  modified_base 15: mod_base = OTHER; note = Nucleotide with phosphorothioate linkage
  modified_base 16: mod_base = OTHER; note = 2'-O-methoxyethyl modified nucleotide
  modified_base 17: mod_base = OTHER; note = 2'-O-methoxyethyl modified thymine
  modified_base 18: mod_base = OTHER; note = 2'-O-methoxyethyl modified nucleotide
  modified_base 19: mod_base = OTHER; note = 2'-O-methoxyethyl modified nucleotide with phosphorothioate linkage
  modified_base 20: mod_base = OTHER; note = 2'-O-methoxyethyl modified 5-methylcytosine
  misc_feature 1..4: note = RNA
  misc_feature 5..15: note = DNA
  misc_feature 16..20: note = RNA
gaaaaaactcttccaataac

SEQ ID NO: 513 - DNA, 20 bp, synthetic construct
  source 1..20: mol_type = other DNA
  modified_base 1: mod_base = OTHER; note = 2'-O-methoxyethyl modified thymine with phosphorothioate linkage
  modified_base 2: mod_base = OTHER; note = 2'-O-methoxyethyl modified 5-methylcytosine
  modified_base 3: mod_base = OTHER; note = 2'-O-methoxyethyl modified thymine
  modified_base 4: mod_base = OTHER; note = 2'-O-methoxyethyl modified nucleotide with phosphorothioate linkage
  modified_base 5: mod_base = OTHER; note = Nucleotide with phosphorothioate linkage
  modified_base 6: mod_base = OTHER; note = Nucleotide with phosphorothioate linkage
  modified_base 7: mod_base = OTHER; note = 5-methylcytosine with phosphorothioate linkage
  modified_base 8: mod_base = OTHER; note = 5-methylcytosine with phosphorothioate linkage
  modified_base 9: mod_base = OTHER; note = Nucleotide with phosphorothioate linkage
  modified_base 10: mod_base = OTHER; note = Nucleotide with phosphorothioate linkage
  modified_base 11: mod_base = OTHER; note = Nucleotide with phosphorothioate linkage
  modified_base 12: mod_base = OTHER; note = Nucleotide with phosphorothioate linkage
  modified_base 13: mod_base = OTHER; note = 5-methylcytosine with phosphorothioate linkage
  modified_base 14: mod_base = OTHER; note = 5-methylcytosine with phosphorothioate linkage
  modified_base 15: mod_base = OTHER; note = Nucleotide with phosphorothioate linkage
  modified_base 16: mod_base = OTHER; note = 2'-O-methoxyethyl modified 5-methylcytosine
  modified_base 17: mod_base = OTHER; note = 2'-O-methoxyethyl modified nucleotide
  modified_base 18: mod_base = OTHER; note = 2'-O-methoxyethyl modified nucleotide
  modified_base 19: mod_base = OTHER; note = 2'-O-methoxyethyl modified 5-methylcytosine with phosphorothioate linkage
  modified_base 20: mod_base = OTHER; note = 2'-O-methoxyethyl modified nucleotide
  misc_feature 1..4: note = RNA
  misc_feature 5..15: note = DNA
  misc_feature 16..20: note = RNA
tctgtaccaatgcctcagca

SEQ ID NO: 514 - DNA, 20 bp, synthetic construct
  source 1..20: mol_type = other DNA
  modified_base 1: mod_base = OTHER; note = 2'-O-methoxyethyl modified 5-methylcytosine with phosphorothioate linkage
  modified_base 2: mod_base = OTHER; note = 2'-O-methoxyethyl modified thymine
  modified_base 3: mod_base = OTHER; note = 2'-O-methoxyethyl modified 5-methylcytosine
  modified_base 4: mod_base = OTHER; note = 2'-O-methoxyethyl modified thymine with phosphorothioate linkage
  modified_base 5: mod_base = OTHER; note = Nucleotide with phosphorothioate linkage
  modified_base 6: mod_base = OTHER; note = Nucleotide with phosphorothioate linkage
  modified_base 7: mod_base = OTHER; note = Nucleotide with phosphorothioate linkage
  modified_base 8: mod_base = OTHER; note = 5-methylcytosine with phosphorothioate linkage
  modified_base 9: mod_base = OTHER; note = 5-methylcytosine with phosphorothioate linkage
  modified_base 10: mod_base = OTHER; note = Nucleotide with phosphorothioate linkage
  modified_base 11: mod_base = OTHER; note = Nucleotide with phosphorothioate linkage
  modified_base 12: mod_base = OTHER; note = Nucleotide with phosphorothioate linkage
  modified_base 13: mod_base = OTHER; note = Nucleotide with phosphorothioate linkage
  modified_base 14: mod_base = OTHER; note = 5-methylcytosine with phosphorothioate linkage
  modified_base 15: mod_base = OTHER; note = 5-methylcytosine with phosphorothioate linkage
  modified_base 16: mod_base = OTHER; note = 2'-O-methoxyethyl modified thymine
  modified_base 17: mod_base = OTHER; note = 2'-O-methoxyethyl modified 5-methylcytosine
  modified_base 18: mod_base = OTHER; note = 2'-O-methoxyethyl modified nucleotide
  modified_base 19: mod_base = OTHER; note = 2'-O-methoxyethyl modified nucleotide with phosphorothioate linkage
  modified_base 20: mod_base = OTHER; note = 2'-O-methoxyethyl modified 5-methylcytosine
  misc_feature 1..4: note = RNA
  misc_feature 5..15: note = DNA
  misc_feature 16..20: note = RNA
ctctgtaccaatgcctcagc

SEQ ID NO: 515 - DNA, 20 bp, synthetic construct
  source 1..20: mol_type = other DNA
  modified_base 1: mod_base = OTHER; note = 2'-O-methoxyethyl modified nucleotide with phosphorothioate linkage
  modified_base 2: mod_base = OTHER; note = 2'-O-methoxyethyl modified 5-methylcytosine
  modified_base 3: mod_base = OTHER; note = 2'-O-methoxyethyl modified thymine
  modified_base 4: mod_base = OTHER; note = 2'-O-methoxyethyl modified 5-methylcytosine with phosphorothioate linkage
  modified_base 5: mod_base = OTHER; note = Nucleotide with phosphorothioate linkage
  modified_base 6: mod_base = OTHER; note = Nucleotide with phosphorothioate linkage
  modified_base 7: mod_base = OTHER; note = Nucleotide with phosphorothioate linkage
  modified_base 8: mod_base = OTHER; note = Nucleotide with phosphorothioate linkage
  modified_base 9: mod_base = OTHER; note = 5-methylcytosine with phosphorothioate linkage
  modified_base 10: mod_base = OTHER; note = 5-methylcytosine with phosphorothioate linkage
  modified_base 11: mod_base = OTHER; note = Nucleotide with phosphorothioate linkage
  modified_base 12: mod_base = OTHER; note = Nucleotide with phosphorothioate linkage
  modified_base 13: mod_base = OTHER; note = Nucleotide with phosphorothioate linkage
  modified_base 14: mod_base = OTHER; note = Nucleotide with phosphorothioate linkage
  modified_base 15: mod_base = OTHER; note = 5-methylcytosine with phosphorothioate linkage
  modified_base 16: mod_base = OTHER; note = 2'-O-methoxyethyl modified 5-methylcytosine
  modified_base 17: mod_base = OTHER; note = 2'-O-methoxyethyl modified thymine
  modified_base 18: mod_base = OTHER; note = 2'-O-methoxyethyl modified 5-methylcytosine
  modified_base 19: mod_base = OTHER; note = 2'-O-methoxyethyl modified nucleotide with phosphorothioate linkage
  modified_base 20: mod_base = OTHER; note = 2'-O-methoxyethyl modified nucleotide
  misc_feature 1..4: note = RNA
  misc_feature 5..15: note = DNA
  misc_feature 16..20: note = RNA
gctctgtaccaatgcctcag

SEQ ID NO: 516 - DNA, 20 bp, synthetic construct
  source 1..20: mol_type = other DNA
  modified_base 1: mod_base = OTHER; note = 2'-O-methoxyethyl modified nucleotide with phosphorothioate linkage
  modified_base 2: mod_base = OTHER; note = 2'-O-methoxyethyl modified nucleotide
  modified_base 3: mod_base = OTHER; note = 2'-O-methoxyethyl modified nucleotide
  modified_base 4: mod_base = OTHER; note = 2'-O-methoxyethyl modified 5-methylcytosine with phosphorothioate linkage
  modified_base 5: mod_base = OTHER; note = Nucleotide with phosphorothioate linkage
  modified_base 6: mod_base = OTHER; note = 5-methylcytosine with phosphorothioate linkage
  modified_base 7: mod_base = OTHER; note = Nucleotide with phosphorothioate linkage
  modified_base 8: mod_base = OTHER; note = Nucleotide with phosphorothioate linkage
  modified_base 9: mod_base = OTHER; note = Nucleotide with phosphorothioate linkage
  modified_base 10: mod_base = OTHER; note = Nucleotide with phosphorothioate linkage
  modified_base 11: mod_base = OTHER; note = 5-methylcytosine with phosphorothioate linkage
  modified_base 12: mod_base = OTHER; note = 5-methylcytosine with phosphorothioate linkage
  modified_base 13: mod_base = OTHER; note = Nucleotide with phosphorothioate linkage
  modified_base 14: mod_base = OTHER; note = Nucleotide with phosphorothioate linkage
  modified_base 15: mod_base = OTHER; note = Nucleotide with phosphorothioate linkage
  modified_base 16: mod_base = OTHER; note = 2'-O-methoxyethyl modified nucleotide
  modified_base 17: mod_base = OTHER; note = 2'-O-methoxyethyl modified 5-methylcytosine
  modified_base 18: mod_base = OTHER; note = 2'-O-methoxyethyl modified 5-methylcytosine
  modified_base 19: mod_base = OTHER; note = 2'-O-methoxyethyl modified thymine with phosphorothioate linkage
  modified_base 20: mod_base = OTHER; note = 2'-O-methoxyethyl modified 5-methylcytosine
  misc_feature 1..4: note = RNA
  misc_feature 5..15: note = DNA
  misc_feature 16..20: note = RNA
aagctctgtaccaatgcctc

SEQ ID NO: 517 - DNA, 17 bp, synthetic construct
  source 1..17: mol_type = other DNA
  modified_base 1: mod_base = OTHER; note = Locked nucleic acid with phosphorothioate linkage
  modified_base 2: mod_base = OTHER; note = Locked 5-methylcytosine with phosphorothioate linkage
  modified_base 3: mod_base = OTHER; note = Locked nucleic acid with phosphorothioate linkage
  modified_base 4: mod_base = OTHER; note = Nucleotide with phosphorothioate linkage
  modified_base 5: mod_base = OTHER; note = Nucleotide with phosphorothioate linkage
  modified_base 6: mod_base = OTHER; note = Nucleotide with phosphorothioate linkage
  modified_base 7: mod_base = OTHER; note = Nucleotide with phosphorothioate linkage
  modified_base 8: mod_base = OTHER; note = 5-methylcytosine with phosphorothioate linkage
  modified_base 9: mod_base = OTHER; note = Nucleotide with phosphorothioate linkage
  modified_base 10: mod_base = OTHER; note = Nucleotide with phosphorothioate linkage
  modified_base 11: mod_base = OTHER; note = Nucleotide with phosphorothioate linkage
  modified_base 12: mod_base = OTHER; note = Nucleotide with phosphorothioate linkage
  modified_base 13: mod_base = OTHER; note = Nucleotide with phosphorothioate linkage
  modified_base 14: mod_base = OTHER; note = Nucleotide with phosphorothioate linkage
  modified_base 15: mod_base = OTHER; note = Locked nucleic acid with phosphorothioate linkage
  modified_base 16: mod_base = OTHER; note = Locked 5-methylcytosine with phosphorothioate linkage
  modified_base 17: mod_base = OTHER; note = Locked nucleic acid
gcgtaggcttaataact

SEQ ID NO: 518 - DNA, 17 bp, synthetic construct
  source 1..17: mol_type = other DNA
  modified_base 1: mod_base = OTHER; note = Locked nucleic acid with phosphorothioate linkage
  modified_base 2: mod_base = OTHER; note = Locked nucleic acid with phosphorothioate linkage
  modified_base 3: mod_base = OTHER; note = Locked 5-methylcytosine with phosphorothioate linkage
  modified_base 4: mod_base = OTHER; note = Nucleotide with phosphorothioate linkage
  modified_base 5: mod_base = OTHER; note = Nucleotide with phosphorothioate linkage
  modified_base 6: mod_base = OTHER; note = Nucleotide with phosphorothioate linkage
  modified_base 7: mod_base = OTHER; note = Nucleotide with phosphorothioate linkage
  modified_base 8: mod_base = OTHER; note = Nucleotide with phosphorothioate linkage
  modified_base 9: mod_base = OTHER; note = 5-methylcytosine with phosphorothioate linkage
  modified_base 10: mod_base = OTHER; note = Nucleotide with phosphorothioate linkage
  modified_base 11: mod_base = OTHER; note = Nucleotide with phosphorothioate linkage
  modified_base 12: mod_base = OTHER; note = Nucleotide with phosphorothioate linkage
  modified_base 13: mod_base = OTHER; note = Nucleotide with phosphorothioate linkage
  modified_base 14: mod_base = OTHER; note = Nucleotide with phosphorothioate linkage
  modified_base 15: mod_base = OTHER; note = Locked nucleic acid with phosphorothioate linkage
  modified_base 16: mod_base = OTHER; note = Locked nucleic acid with phosphorothioate linkage
  modified_base 17: mod_base = OTHER; note = Locked 5-methylcytosine
agcgtaggcttaataac

SEQ ID NO: 519 - DNA, 17 bp, synthetic construct
  source 1..17: mol_type = other DNA
  modified_base 1: mod_base = OTHER; note = Locked nucleic acid with phosphorothioate linkage
  modified_base 2: mod_base = OTHER; note = Locked nucleic acid with phosphorothioate linkage
  modified_base 3: mod_base = OTHER; note = Locked nucleic acid with phosphorothioate linkage
  modified_base 4: mod_base = OTHER; note = 5-methylcytosine with phosphorothioate linkage
  modified_base 5: mod_base = OTHER; note = Nucleotide with phosphorothioate linkage
  modified_base 6: mod_base = OTHER; note = Nucleotide with phosphorothioate linkage
  modified_base 7: mod_base = OTHER; note = Nucleotide with phosphorothioate linkage
  modified_base 8: mod_base = OTHER; note = Nucleotide with phosphorothioate linkage
  modified_base 9: mod_base = OTHER; note = Nucleotide with phosphorothioate linkage
  modified_base 10: mod_base = OTHER; note = 5-methylcytosine with phosphorothioate linkage
  modified_base 11: mod_base = OTHER; note = Nucleotide with phosphorothioate linkage
  modified_base 12: mod_base = OTHER; note = Nucleotide with phosphorothioate linkage
  modified_base 13: mod_base = OTHER; note = Nucleotide with phosphorothioate linkage
  modified_base 14: mod_base = OTHER; note = Nucleotide with phosphorothioate linkage
  modified_base 15: mod_base = OTHER; note = Locked nucleic acid with phosphorothioate linkage
  modified_base 16: mod_base = OTHER; note = Locked nucleic acid with phosphorothioate linkage
  modified_base 17: mod_base = OTHER; note = Locked nucleic acid
gagcgtaggcttaataa

SEQ ID NO: 520 - DNA, 17 bp, synthetic construct
  source 1..17: mol_type = other DNA
  modified_base 1: mod_base = OTHER; note = Locked nucleic acid with phosphorothioate linkage
  modified_base 2: mod_base = OTHER; note = Locked nucleic acid with phosphorothioate linkage
  modified_base 3: mod_base = OTHER; note = Locked nucleic acid with phosphorothioate linkage
  modified_base 4: mod_base = OTHER; note = Nucleotide with phosphorothioate linkage
  modified_base 5: mod_base = OTHER; note = 5-methylcytosine with phosphorothioate linkage
  modified_base 6: mod_base = OTHER; note = Nucleotide with phosphorothioate linkage
  modified_base 7: mod_base = OTHER; note = Nucleotide with phosphorothioate linkage
  modified_base 8: mod_base = OTHER; note = Nucleotide with phosphorothioate linkage
  modified_base 9: mod_base = OTHER; note = Nucleotide with phosphorothioate linkage
  modified_base 10: mod_base = OTHER; note = Nucleotide with phosphorothioate linkage
  modified_base 11: mod_base = OTHER; note = 5-methylcytosine with phosphorothioate linkage
  modified_base 12: mod_base = OTHER; note = Nucleotide with phosphorothioate linkage
  modified_base 13: mod_base = OTHER; note = Nucleotide with phosphorothioate linkage
  modified_base 14: mod_base = OTHER; note = Nucleotide with phosphorothioate linkage
  modified_base 15: mod_base = OTHER; note = Locked nucleic acid with phosphorothioate linkage
  modified_base 16: mod_base = OTHER; note = Locked nucleic acid with phosphorothioate linkage
  modified_base 17: mod_base = OTHER; note = Locked nucleic acid
tgagcgtaggcttaata

SEQ ID NO: 521 - DNA, 17 bp, synthetic construct
  source 1..17: mol_type = other DNA
  modified_base 1: mod_base = OTHER; note = Locked 5-methylcytosine with phosphorothioate linkage
  modified_base 2: mod_base = OTHER; note = Locked nucleic acid with phosphorothioate linkage
  modified_base 3: mod_base = OTHER; note = Locked nucleic acid with phosphorothioate linkage
  modified_base 4: mod_base = OTHER; note = Nucleotide with phosphorothioate linkage
  modified_base 5: mod_base = OTHER; note = Nucleotide with phosphorothioate linkage
  modified_base 6: mod_base = OTHER; note = 5-methylcytosine with phosphorothioate linkage
  modified_base 7: mod_base = OTHER; note = Nucleotide with phosphorothioate linkage
  modified_base 8: mod_base = OTHER; note = Nucleotide with phosphorothioate linkage
  modified_base 9: mod_base = OTHER; note = Nucleotide with phosphorothioate linkage
  modified_base 10: mod_base = OTHER; note = Nucleotide with phosphorothioate linkage
  modified_base 11: mod_base = OTHER; note = Nucleotide with phosphorothioate linkage
  modified_base 12: mod_base = OTHER; note = 5-methylcytosine with phosphorothioate linkage
  modified_base 13: mod_base = OTHER; note = Nucleotide with phosphorothioate linkage
  modified_base 14: mod_base = OTHER; note = Nucleotide with phosphorothioate linkage
  modified_base 15: mod_base = OTHER; note = Locked nucleic acid with phosphorothioate linkage
  modified_base 16: mod_base = OTHER; note = Locked nucleic acid with phosphorothioate linkage
  modified_base 17: mod_base = OTHER; note = Locked nucleic acid
ctgagcgtaggcttaat

SEQ ID NO: 522 - DNA, 17 bp, synthetic construct
  source 1..17: mol_type = other DNA
  modified_base 1: mod_base = OTHER; note = Locked 5-methylcytosine with phosphorothioate linkage
  modified_base 2: mod_base = OTHER; note = Locked nucleic acid with phosphorothioate linkage
  modified_base 3: mod_base = OTHER; note = Locked nucleic acid with phosphorothioate linkage
  modified_base 4: mod_base = OTHER; note = Nucleotide with phosphorothioate linkage
  modified_base 5: mod_base = OTHER; note = Nucleotide with phosphorothioate linkage
  modified_base 6: mod_base = OTHER; note = Nucleotide with phosphorothioate linkage
  modified_base 7: mod_base = OTHER; note = Nucleotide with phosphorothioate linkage
  modified_base 8: mod_base = OTHER; note = Nucleotide with phosphorothioate linkage
  modified_base 9: mod_base = OTHER; note = Nucleotide with phosphorothioate linkage
  modified_base 10: mod_base = OTHER; note = Nucleotide with phosphorothioate linkage
  modified_base 11: mod_base = OTHER; note = 5-methylcytosine with phosphorothioate linkage
  modified_base 12: mod_base = OTHER; note = Nucleotide with phosphorothioate linkage
  modified_base 13: mod_base = OTHER; note = Nucleotide with phosphorothioate linkage
  modified_base 14: mod_base = OTHER; note = Nucleotide with phosphorothioate linkage
  modified_base 15: mod_base = OTHER; note = Locked nucleic acid with phosphorothioate linkage
  modified_base 16: mod_base = OTHER; note = Locked 5-methylcytosine with phosphorothioate linkage
  modified_base 17: mod_base = OTHER; note = Locked nucleic acid
ctattagatgctttgca

SEQ ID NO: 523 - DNA, 17 bp, synthetic construct
  source 1..17: mol_type = other DNA
  modified_base 1: mod_base = OTHER; note = Locked 5-methylcytosine with phosphorothioate linkage
  modified_base 2: mod_base = OTHER; note = Locked nucleic acid with phosphorothioate linkage
  modified_base 3: mod_base = OTHER; note = Locked nucleic acid with phosphorothioate linkage
  modified_base 4: mod_base = OTHER; note = Nucleotide with phosphorothioate linkage
  modified_base 5: mod_base = OTHER; note = 5-methylcytosine with phosphorothioate linkage
  modified_base 6: mod_base = OTHER; note = Nucleotide with phosphorothioate linkage
  modified_base 7: mod_base = OTHER; note = Nucleotide with phosphorothioate linkage
  modified_base 8: mod_base = OTHER; note = Nucleotide with phosphorothioate linkage
  modified_base 9: mod_base = OTHER; note = Nucleotide with phosphorothioate linkage
  modified_base 10: mod_base = OTHER; note = Nucleotide with phosphorothioate linkage
  modified_base 11: mod_base = OTHER; note = Nucleotide with phosphorothioate linkage
  modified_base 12: mod_base = OTHER; note = Nucleotide with phosphorothioate linkage
  modified_base 13: mod_base = OTHER; note = Nucleotide with phosphorothioate linkage
  modified_base 14: mod_base = OTHER; note = Nucleotide with phosphorothioate linkage
  modified_base 15: mod_base = OTHER; note = Locked 5-methylcytosine with phosphorothioate linkage
  modified_base 16: mod_base = OTHER; note = Locked nucleic acid with phosphorothioate linkage
  modified_base 17: mod_base = OTHER; note = Locked nucleic acid
cgttctattagatgctt

SEQ ID NO: 524 - DNA, 17 bp, synthetic construct
  source 1..17: mol_type = other DNA
  modified_base 1: mod_base = OTHER; note = Locked nucleic acid with phosphorothioate linkage
  modified_base 2: mod_base = OTHER; note = Locked 5-methylcytosine with phosphorothioate linkage
  modified_base 3: mod_base = OTHER; note = Locked nucleic acid with phosphorothioate linkage
  modified_base 4: mod_base = OTHER; note = Nucleotide with phosphorothioate linkage
  modified_base 5: mod_base = OTHER; note = Nucleotide with phosphorothioate linkage
  modified_base 6: mod_base = OTHER; note = 5-methylcytosine with phosphorothioate linkage
  modified_base 7: mod_base = OTHER; note = Nucleotide with phosphorothioate linkage
  modified_base 8: mod_base = OTHER; note = Nucleotide with phosphorothioate linkage
  modified_base 9: mod_base = OTHER; note = Nucleotide with phosphorothioate linkage
  modified_base 10: mod_base = OTHER; note = Nucleotide with phosphorothioate linkage
  modified_base 11: mod_base = OTHER; note = Nucleotide with phosphorothioate linkage
  modified_base 12: mod_base = OTHER; note = Nucleotide with phosphorothioate linkage
  modified_base 13: mod_base = OTHER; note = Nucleotide with phosphorothioate linkage
  modified_base 14: mod_base = OTHER; note = Nucleotide with phosphorothioate linkage
  modified_base 15: mod_base = OTHER; note = Locked nucleic acid with phosphorothioate linkage
  modified_base 16: mod_base = OTHER; note = Locked 5-methylcytosine with phosphorothioate linkage
  modified_base 17: mod_base = OTHER; note = Locked nucleic acid
gcgttctattagatgct

SEQ ID NO: 525 - DNA, 17 bp, synthetic construct
  source 1..17: mol_type = other DNA
  modified_base 1: mod_base = OTHER; note = Locked nucleic acid with phosphorothioate linkage
  modified_base 2: mod_base = OTHER; note = Locked nucleic acid with phosphorothioate linkage
  modified_base 3: mod_base = OTHER; note = Locked nucleic acid with phosphorothioate linkage
  modified_base 4: mod_base = OTHER; note = Nucleotide with phosphorothioate linkage
  modified_base 5: mod_base = OTHER; note = 5-methylcytosine with phosphorothioate linkage
  modified_base 6: mod_base = OTHER; note = Nucleotide with phosphorothioate linkage
  modified_base 7: mod_base = OTHER; note = Nucleotide with phosphorothioate linkage
  modified_base 8: mod_base = OTHER; note = Nucleotide with phosphorothioate linkage
  modified_base 9: mod_base = OTHER; note = 5-methylcytosine with phosphorothioate linkage
  modified_base 10: mod_base = OTHER; note = Nucleotide with phosphorothioate linkage
  modified_base 11: mod_base = OTHER; note = Nucleotide with phosphorothioate linkage
  modified_base 12: mod_base = OTHER; note = Nucleotide with phosphorothioate linkage
  modified_base 13: mod_base = OTHER; note = Nucleotide with phosphorothioate linkage
  modified_base 14: mod_base = OTHER; note = Nucleotide with phosphorothioate linkage
  modified_base 15: mod_base = OTHER; note = Locked nucleic acid with phosphorothioate linkage
  modified_base 16: mod_base = OTHER; note = Locked nucleic acid with phosphorothioate linkage
  modified_base 17: mod_base = OTHER; note = Locked nucleic acid
gtagcgttctattagat

SEQ ID NO: 526 - DNA, 17 bp, synthetic construct
  source 1..17: mol_type = other DNA
  modified_base 1: mod_base = OTHER; note = Locked nucleic acid with phosphorothioate linkage
  modified_base 2: mod_base = OTHER; note = Locked nucleic acid with phosphorothioate linkage
  modified_base 3: mod_base = OTHER; note = Locked nucleic acid with phosphorothioate linkage
  modified_base 4: mod_base = OTHER; note = Nucleotide with phosphorothioate linkage
  modified_base 5: mod_base = OTHER; note = Nucleotide with phosphorothioate linkage
  modified_base 6: mod_base = OTHER; note = Nucleotide with phosphorothioate linkage
  modified_base 7: mod_base = OTHER; note = Nucleotide with phosphorothioate linkage
  modified_base 8: mod_base = OTHER; note = 5-methylcytosine with phosphorothioate linkage
  modified_base 9: mod_base = OTHER; note = Nucleotide with phosphorothioate linkage
  modified_base 10: mod_base = OTHER; note = Nucleotide with phosphorothioate linkage
  modified_base 11: mod_base = OTHER; note = Nucleotide with phosphorothioate linkage
  modified_base 12: mod_base = OTHER; note = 5-methylcytosine with phosphorothioate linkage
  modified_base 13: mod_base = OTHER; note = Nucleotide with phosphorothioate linkage
  modified_base 14: mod_base = OTHER; note = Nucleotide with phosphorothioate linkage
  modified_base 15: mod_base = OTHER; note = Locked nucleic acid with phosphorothioate linkage
  modified_base 16: mod_base = OTHER; note = Locked nucleic acid with phosphorothioate linkage
  modified_base 17: mod_base = OTHER; note = Locked nucleic acid
gtagtagcgttctatta

SEQ ID NO: 527 - DNA, 17 bp, synthetic construct
  source 1..17: mol_type = other DNA
  modified_base 1: mod_base = OTHER; note = Locked nucleic acid with phosphorothioate linkage
  modified_base 2: mod_base = OTHER; note = Locked nucleic acid with phosphorothioate linkage
  modified_base 3: mod_base = OTHER; note = Locked nucleic acid with phosphorothioate linkage
  modified_base 4: mod_base = OTHER; note = Nucleotide with phosphorothioate linkage
  modified_base 5: mod_base = OTHER; note = Nucleotide with phosphorothioate linkage
  modified_base 6: mod_base = OTHER; note = Nucleotide with phosphorothioate linkage
  modified_base 7: mod_base = OTHER; note = Nucleotide with phosphorothioate linkage
  modified_base 8: mod_base = OTHER; note = Nucleotide with phosphorothioate linkage
  modified_base 9: mod_base = OTHER; note = 5-methylcytosine with phosphorothioate linkage
  modified_base 10: mod_base = OTHER; note = Nucleotide with phosphorothioate linkage
  modified_base 11: mod_base = OTHER; note = Nucleotide with phosphorothioate linkage
  modified_base 12: mod_base = OTHER; note = Nucleotide with phosphorothioate linkage
  modified_base 13: mod_base = OTHER; note = 5-methylcytosine with phosphorothioate linkage
  modified_base 14: mod_base = OTHER; note = Nucleotide with phosphorothioate linkage
  modified_base 15: mod_base = OTHER; note = Locked nucleic acid with phosphorothioate linkage
  modified_base 16: mod_base = OTHER; note = Locked nucleic acid with phosphorothioate linkage
  modified_base 17: mod_base = OTHER; note = Locked nucleic acid
ggtagtagcgttctatt

SEQ ID NO: 528 - DNA, 17 bp, synthetic construct
  source 1..17: mol_type = other DNA
  modified_base 1: mod_base = OTHER; note = Locked nucleic acid with phosphorothioate linkage
  modified_base 2: mod_base = OTHER; note = Locked nucleic acid with phosphorothioate linkage
  modified_base 3: mod_base = OTHER; note = Locked nucleic acid with phosphorothioate linkage
  modified_base 4: mod_base = OTHER; note = Nucleotide with phosphorothioate linkage
  modified_base 5: mod_base = OTHER; note = Nucleotide with phosphorothioate linkage
  modified_base 6: mod_base = OTHER; note = Nucleotide with phosphorothioate linkage
  modified_base 7: mod_base = OTHER; note = Nucleotide with phosphorothioate linkage
  modified_base 8: mod_base = OTHER; note = Nucleotide with phosphorothioate linkage
  modified_base 9: mod_base = OTHER; note = Nucleotide with phosphorothioate linkage
  modified_base 10: mod_base = OTHER; note = 5-methylcytosine with phosphorothioate linkage
  modified_base 11: mod_base = OTHER; note = Nucleotide with phosphorothioate linkage
  modified_base 12: mod_base = OTHER; note = Nucleotide with phosphorothioate linkage
  modified_base 13: mod_base = OTHER; note = Nucleotide with phosphorothioate linkage
  modified_base 14: mod_base = OTHER; note = 5-methylcytosine with phosphorothioate linkage
  modified_base 15: mod_base = OTHER; note = Locked nucleic acid with phosphorothioate linkage
  modified_base 16: mod_base = OTHER; note = Locked nucleic acid with phosphorothioate linkage
  modified_base 17: mod_base = OTHER; note = Locked nucleic acid
tggtagtagcgttctat

SEQ ID NO: 529 - DNA, 17 bp, synthetic construct
  source 1..17: mol_type = other DNA
  modified_base 1: mod_base = OTHER; note = Locked nucleic acid with phosphorothioate linkage
  modified_base 2: mod_base = OTHER; note = Locked nucleic acid with phosphorothioate linkage
  modified_base 3: mod_base = OTHER; note = Locked nucleic acid with phosphorothioate linkage
  modified_base 4: mod_base = OTHER; note = Nucleotide with phosphorothioate linkage
  modified_base 5: mod_base = OTHER; note = Nucleotide with phosphorothioate linkage
  modified_base 6: mod_base = OTHER; note = Nucleotide with phosphorothioate linkage
  modified_base 7: mod_base = OTHER; note = Nucleotide with phosphorothioate linkage
  modified_base 8: mod_base = OTHER; note = Nucleotide with phosphorothioate linkage
  modified_base 9: mod_base = OTHER; note = Nucleotide with phosphorothioate linkage
  modified_base 10: mod_base = OTHER; note = Nucleotide with phosphorothioate linkage
  modified_base 11: mod_base = OTHER; note = 5-methylcytosine with phosphorothioate linkage
  modified_base 12: mod_base = OTHER; note = Nucleotide with phosphorothioate linkage
  modified_base 13: mod_base = OTHER; note = Nucleotide with phosphorothioate linkage
  modified_base 14: mod_base = OTHER; note = Nucleotide with phosphorothioate linkage
  modified_base 15: mod_base = OTHER; note = Locked 5-methylcytosine with phosphorothioate linkage
  modified_base 16: mod_base = OTHER; note = Locked nucleic acid with phosphorothioate linkage
  modified_base 17: mod_base = OTHER; note = Locked nucleic acid
gtggtagtagcgttcta

SEQ ID NO: 530 - DNA, 17 bp, synthetic construct
  source 1..17: mol_type = other DNA
  modified_base 1: mod_base = OTHER; note = Locked nucleic acid with phosphorothioate linkage
  modified_base 2: mod_base = OTHER; note = Locked nucleic acid with phosphorothioate linkage
  modified_base 3: mod_base = OTHER; note = Locked nucleic acid with phosphorothioate linkage
  modified_base 4: mod_base = OTHER; note = Nucleotide with phosphorothioate linkage
  modified_base 5: mod_base = OTHER; note = Nucleotide with phosphorothioate linkage
  modified_base 6: mod_base = OTHER; note = 5-methylcytosine with phosphorothioate linkage
  modified_base 7: mod_base = OTHER; note = Nucleotide with phosphorothioate linkage
  modified_base 8: mod_base = OTHER; note = Nucleotide with phosphorothioate linkage
  modified_base 9: mod_base = OTHER; note = Nucleotide with phosphorothioate linkage
  modified_base 10: mod_base = OTHER; note = Nucleotide with phosphorothioate linkage
  modified_base 11: mod_base = OTHER; note = Nucleotide with phosphorothioate linkage
  modified_base 12: mod_base = OTHER; note = Nucleotide with phosphorothioate linkage
  modified_base 13: mod_base = OTHER; note = Nucleotide with phosphorothioate linkage
  modified_base 14: mod_base = OTHER; note = Nucleotide with phosphorothioate linkage
  modified_base 15: mod_base = OTHER; note = Locked nucleic acid with phosphorothioate linkage
  modified_base 16: mod_base = OTHER; note = Locked nucleic acid with phosphorothioate linkage
  modified_base 17: mod_base = OTHER; note = Locked nucleic acid
gttaactggtggtagta

SEQ ID NO: 531 - DNA, 17 bp, synthetic construct
  source 1..17: mol_type = other DNA
  modified_base 1: mod_base = OTHER; note = Locked nucleic acid with phosphorothioate linkage
  modified_base 2: mod_base = OTHER; note = Locked 5-methylcytosine with phosphorothioate linkage
  modified_base 3: mod_base = OTHER; note = Locked nucleic acid with phosphorothioate linkage
  modified_base 4: mod_base = OTHER; note = Nucleotide with phosphorothioate linkage
  modified_base 5: mod_base = OTHER; note = Nucleotide with phosphorothioate linkage
  modified_base 6: mod_base = OTHER; note = Nucleotide with phosphorothioate linkage
  modified_base 7: mod_base = OTHER; note = Nucleotide with phosphorothioate linkage
  modified_base 8: mod_base = OTHER; note = Nucleotide with phosphorothioate linkage
  modified_base 9: mod_base = OTHER; note = 5-methylcytosine with phosphorothioate linkage
  modified_base 10: mod_base = OTHER; note = Nucleotide with phosphorothioate linkage
  modified_base 11: mod_base = OTHER; note = Nucleotide with phosphorothioate linkage
  modified_base 12: mod_base = OTHER; note = Nucleotide with phosphorothioate linkage
  modified_base 13: mod_base = OTHER; note = Nucleotide with phosphorothioate linkage
  modified_base 14: mod_base = OTHER; note = Nucleotide with phosphorothioate linkage
  modified_base 15: mod_base = OTHER; note = Locked nucleic acid with phosphorothioate linkage
  modified_base 16: mod_base = OTHER; note = Locked nucleic acid with phosphorothioate linkage
  modified_base 17: mod_base = OTHER; note = Locked nucleic acid
tcagttaactggtggta

SEQ ID NO: 532 - DNA, 17 bp, synthetic construct
  source 1..17: mol_type = other DNA
  modified_base 1: mod_base = OTHER; note = Locked nucleic acid with phosphorothioate linkage
  modified_base 2: mod_base = OTHER; note = Locked nucleic acid with phosphorothioate linkage
  modified_base 3: mod_base = OTHER; note = Locked nucleic acid with phosphorothioate linkage
  modified_base 4: mod_base = OTHER; note = Nucleotide with phosphorothioate linkage
  modified_base 5: mod_base = OTHER; note = Nucleotide with phosphorothioate linkage
  modified_base 6: mod_base = OTHER; note = 5-methylcytosine with phosphorothioate linkage
  modified_base 7: mod_base = OTHER; note = Nucleotide with phosphorothioate linkage
  modified_base 8: mod_base = OTHER; note = 5-methylcytosine with phosphorothioate linkage
  modified_base 9: mod_base = OTHER; note = Nucleotide with phosphorothioate linkage
  modified_base 10: mod_base = OTHER; note = Nucleotide with phosphorothioate linkage
  modified_base 11: mod_base = OTHER; note = Nucleotide with phosphorothioate linkage
  modified_base 12: mod_base = OTHER; note = Nucleotide with phosphorothioate linkage
  modified_base 13: mod_base = OTHER; note = 5-methylcytosine with phosphorothioate linkage
  modified_base 14: mod_base = OTHER; note = Nucleotide with phosphorothioate linkage
  modified_base 15: mod_base = OTHER; note = Locked 5-methylcytosine with phosphorothioate linkage
  modified_base 16: mod_base = OTHER; note = Locked nucleic acid with phosphorothioate linkage
  modified_base 17: mod_base = OTHER; note = Locked nucleic acid
ggaagcacaaaactcat

SEQ ID NO: 533 - DNA, 17 bp, synthetic construct
  source 1..17: mol_type = other DNA
  modified_base 1: mod_base = OTHER; note = Locked nucleic acid with phosphorothioate linkage
  modified_base 2: mod_base = OTHER; note = Locked nucleic acid with phosphorothioate linkage
  modified_base 3: mod_base = OTHER; note = Locked nucleic acid with phosphorothioate linkage
  modified_base 4: mod_base = OTHER; note = Nucleotide with phosphorothioate linkage
  modified_base 5: mod_base = OTHER; note = Nucleotide with phosphorothioate linkage
  modified_base 6: mod_base = OTHER; note = Nucleotide with phosphorothioate linkage
  modified_base 7: mod_base = OTHER; note = 5-methylcytosine with phosphorothioate linkage
  modified_base 8: mod_base = OTHER; note = Nucleotide with phosphorothioate linkage
  modified_base 9: mod_base = OTHER; note = 5-methylcytosine with phosphorothioate linkage
  modified_base 10: mod_base = OTHER; note = Nucleotide with phosphorothioate linkage
  modified_base 11: mod_base = OTHER; note = Nucleotide with phosphorothioate linkage
  modified_base 12: mod_base = OTHER; note = Nucleotide with phosphorothioate linkage
  modified_base 13: mod_base = OTHER; note = Nucleotide with phosphorothioate linkage
  modified_base 14: mod_base = OTHER; note = 5-methylcytosine with phosphorothioate linkage
  modified_base 15: mod_base = OTHER; note = Locked nucleic acid with phosphorothioate linkage
  modified_base 16: mod_base = OTHER; note = Locked 5-methylcytosine with phosphorothioate linkage
  modified_base 17: mod_base = OTHER; note = Locked nucleic acid
aggaagcacaaaactca

SEQ ID NO: 534 - DNA, 17 bp, synthetic construct
  source 1..17: mol_type = other DNA
  modified_base 1: mod_base = OTHER; note = Locked nucleic acid with phosphorothioate linkage
  modified_base 2: mod_base = OTHER; note = Locked nucleic acid with phosphorothioate linkage
  modified_base 3: mod_base = OTHER; note = Locked 5-methylcytosine with phosphorothioate linkage
  modified_base 4: mod_base = OTHER; note = Nucleotide with phosphorothioate linkage
  modified_base 5: mod_base = OTHER; note = Nucleotide with phosphorothioate linkage
  modified_base 6: mod_base = OTHER; note = Nucleotide with phosphorothioate linkage
  modified_base 7: mod_base = OTHER; note = Nucleotide with phosphorothioate linkage
  modified_base 8: mod_base = OTHER; note = Nucleotide with phosphorothioate linkage
  modified_base 9: mod_base = OTHER; note = Nucleotide with phosphorothioate linkage
  modified_base 10: mod_base = OTHER; note = 5-methylcytosine with phosphorothioate linkage
  modified_base 11: mod_base = OTHER; note = Nucleotide with phosphorothioate linkage
  modified_base 12: mod_base = OTHER; note = 5-methylcytosine with phosphorothioate linkage
  modified_base 13: mod_base = OTHER; note = Nucleotide with phosphorothioate linkage
  modified_base 14: mod_base = OTHER; note = Nucleotide with phosphorothioate linkage
  modified_base 15: mod_base = OTHER; note = Locked nucleic acid with phosphorothioate linkage
  modified_base 16: mod_base = OTHER; note = Locked nucleic acid with phosphorothioate linkage
  modified_base 17: mod_base = OTHER; note = Locked 5-methylcytosine
gacaggaagcacaaaac

SEQ ID NO: 535 - DNA, 17 bp, synthetic construct
  source 1..17: mol_type = other DNA
  modified_base 1: mod_base = OTHER; note = Locked nucleic acid with phosphorothioate linkage
  modified_base 2: mod_base = OTHER; note = Locked nucleic acid with phosphorothioate linkage
  modified_base 3: mod_base = OTHER; note = Locked 5-methylcytosine with phosphorothioate linkage
  modified_base 4: mod_base = OTHER; note = Nucleotide with phosphorothioate linkage
  modified_base 5: mod_base = OTHER; note = 5-methylcytosine with phosphorothioate linkage
  modified_base 6: mod_base = OTHER; note = Nucleotide with phosphorothioate linkage
  modified_base 7: mod_base = OTHER; note = Nucleotide with phosphorothioate linkage
  modified_base 8: mod_base = OTHER; note = Nucleotide with phosphorothioate linkage
  modified_base 9: mod_base = OTHER; note = Nucleotide with phosphorothioate linkage
  modified_base 10: mod_base = OTHER; note = Nucleotide with phosphorothioate linkage
  modified_base 11: mod_base = OTHER; note = 5-methylcytosine with phosphorothioate linkage
  modified_base 12: mod_base = OTHER; note = Nucleotide with phosphorothioate linkage
  modified_base 13: mod_base = OTHER; note = Nucleotide with phosphorothioate linkage
  modified_base 14: mod_base = OTHER; note = Nucleotide with phosphorothioate linkage
  modified_base 15: mod_base = OTHER; note = Locked nucleic acid with phosphorothioate linkage
  modified_base 16: mod_base = OTHER; note = Locked nucleic acid with phosphorothioate linkage
  modified_base 17: mod_base = OTHER; note = Locked nucleic acid
agctcgagggctttaat

SEQ ID NO: 536 - DNA, 17 bp, synthetic construct
  source 1..17: mol_type = other DNA
  modified_base 1: mod_base = OTHER; note = Locked nucleic acid with phosphorothioate linkage
  modified_base 2: mod_base = OTHER; note = Locked nucleic acid with phosphorothioate linkage
  modified_base 3: mod_base = OTHER; note = Locked nucleic acid with phosphorothioate linkage
  modified_base 4: mod_base = OTHER; note = 5-methylcytosine with phosphorothioate linkage
  modified_base 5: mod_base = OTHER; note = Nucleotide with phosphorothioate linkage
  modified_base 6: mod_base = OTHER; note = 5-methylcytosine with phosphorothioate linkage
  modified_base 7: mod_base = OTHER; note = Nucleotide with phosphorothioate linkage
  modified_base 8: mod_base = OTHER; note = Nucleotide with phosphorothioate linkage
  modified_base 9: mod_base = OTHER; note = Nucleotide with phosphorothioate linkage
  modified_base 10: mod_base = OTHER; note = Nucleotide with phosphorothioate linkage
  modified_base 11: mod_base = OTHER; note = Nucleotide with phosphorothioate linkage
  modified_base 12: mod_base = OTHER; note = 5-methylcytosine with phosphorothioate linkage
  modified_base 13: mod_base = OTHER; note = Nucleotide with phosphorothioate linkage
  modified_base 14: mod_base = OTHER; note = Nucleotide with phosphorothioate linkage
  modified_base 15: mod_base = OTHER; note = Locked nucleic acid with phosphorothioate linkage
  modified_base 16: mod_base = OTHER; note = Locked nucleic acid with phosphorothioate linkage
  modified_base 17: mod_base = OTHER; note = Locked nucleic acid
aagctcgagggctttaa

SEQ ID NO: 537 - DNA, 17 bp, synthetic construct
  source 1..17: mol_type = other DNA
  modified_base 1: mod_base = OTHER; note = Locked nucleic acid with phosphorothioate linkage
  modified_base 2: mod_base = OTHER; note = Locked nucleic acid with phosphorothioate linkage
  modified_base 3: mod_base = OTHER; note = Locked nucleic acid with phosphorothioate linkage
  modified_base 4: mod_base = OTHER; note = Nucleotide with phosphorothioate linkage
  modified_base 5: mod_base = OTHER; note = Nucleotide with phosphorothioate linkage
  modified_base 6: mod_base = OTHER; note = 5-methylcytosine with phosphorothioate linkage
  modified_base 7: mod_base = OTHER; note = Nucleotide with phosphorothioate linkage
  modified_base 8: mod_base = OTHER; note = 5-methylcytosine with phosphorothioate linkage
  modified_base 9: mod_base = OTHER; note = Nucleotide with phosphorothioate linkage
  modified_base 10: mod_base = OTHER; note = Nucleotide with phosphorothioate linkage
  modified_base 11: mod_base = OTHER; note = Nucleotide with phosphorothioate linkage
  modified_base 12: mod_base = OTHER; note = Nucleotide with phosphorothioate linkage
  modified_base 13: mod_base = OTHER; note = Nucleotide with phosphorothioate linkage
  modified_base 14: mod_base = OTHER; note = 5-methylcytosine with phosphorothioate linkage
  modified_base 15: mod_base = OTHER; note = Locked nucleic acid with phosphorothioate linkage
  modified_base 16: mod_base = OTHER; note = Locked nucleic acid with phosphorothioate linkage
  modified_base 17: mod_base = OTHER; note = Locked nucleic acid
taaagctcgagggcttt

SEQ ID NO: 538 - DNA, 17 bp, synthetic construct
  source 1..17: mol_type = other DNA
  modified_base 1: mod_base = OTHER; note = Locked nucleic acid with phosphorothioate linkage
  modified_base 2: mod_base = OTHER; note = Locked nucleic acid with phosphorothioate linkage
  modified_base 3: mod_base = OTHER; note = Locked nucleic acid with phosphorothioate linkage
  modified_base 4: mod_base = OTHER; note = Nucleotide with phosphorothioate linkage
  modified_base 5: mod_base = OTHER; note = Nucleotide with phosphorothioate linkage
  modified_base 6: mod_base = OTHER; note = Nucleotide with phosphorothioate linkage
  modified_base 7: mod_base = OTHER; note = 5-methylcytosine with phosphorothioate linkage
  modified_base 8: mod_base = OTHER; note = Nucleotide with phosphorothioate linkage
  modified_base 9: mod_base = OTHER; note = 5-methylcytosine with phosphorothioate linkage
  modified_base 10: mod_base = OTHER; note = Nucleotide with phosphorothioate linkage
  modified_base 11: mod_base = OTHER; note = Nucleotide with phosphorothioate linkage
  modified_base 12: mod_base = OTHER; note = Nucleotide with phosphorothioate linkage
  modified_base 13: mod_base = OTHER; note = Nucleotide with phosphorothioate linkage
  modified_base 14: mod_base = OTHER; note = Nucleotide with phosphorothioate linkage
  modified_base 15: mod_base = OTHER; note = Locked 5-methylcytosine with phosphorothioate linkage
  modified_base 16: mod_base = OTHER; note = Locked nucleic acid with phosphorothioate linkage
  modified_base 17: mod_base = OTHER; note = Locked nucleic acid
ataaagctcgagggctt

SEQ ID NO: 539 - DNA, 17 bp, synthetic construct
  source 1..17: mol_type = other DNA
  modified_base 1: mod_base = OTHER; note = Locked nucleic acid with phosphorothioate linkage
  modified_base 2: mod_base = OTHER; note = Locked nucleic acid with phosphorothioate linkage
  modified_base 3: mod_base = OTHER; note = Locked nucleic acid with phosphorothioate linkage
  modified_base 4: mod_base = OTHER; note = Nucleotide with phosphorothioate linkage
  modified_base 5: mod_base = OTHER; note = Nucleotide with phosphorothioate linkage
  modified_base 6: mod_base = OTHER; note = Nucleotide with phosphorothioate linkage
  modified_base 7: mod_base = OTHER; note = Nucleotide with phosphorothioate linkage
  modified_base 8: mod_base = OTHER; note = Nucleotide with phosphorothioate linkage
  modified_base 9: mod_base = OTHER; note = Nucleotide with phosphorothioate linkage
  modified_base 10: mod_base = OTHER; note = Nucleotide with phosphorothioate linkage
  modified_base 11: mod_base = OTHER; note = Nucleotide with phosphorothioate linkage
  modified_base 12: mod_base = OTHER; note = Nucleotide with phosphorothioate linkage
  modified_base 13: mod_base = OTHER; note = Nucleotide with phosphorothioate linkage
  modified_base 14: mod_base = OTHER; note = 5-methylcytosine with phosphorothioate linkage
  modified_base 15: mod_base = OTHER; note = Locked nucleic acid with phosphorothioate linkage
  modified_base 16: mod_base = OTHER; note = Locked 5-methylcytosine with phosphorothioate linkage
  modified_base 17: mod_base = OTHER; note = Locked nucleic acid
gagggatgaggatcaca

SEQ ID NO: 540 - DNA, 17 bp, synthetic construct
  source 1..17: mol_type = other DNA
  modified_base 1: mod_base = OTHER; note = Locked 5-methylcytosine with phosphorothioate linkage
  modified_base 2: mod_base = OTHER; note = Locked nucleic acid with phosphorothioate linkage
  modified_base 3: mod_base = OTHER; note = Locked nucleic acid with phosphorothioate linkage
  modified_base 4: mod_base = OTHER; note = Nucleotide with phosphorothioate linkage
  modified_base 5: mod_base = OTHER; note = Nucleotide with phosphorothioate linkage
  modified_base 6: mod_base = OTHER; note = Nucleotide with phosphorothioate linkage
  modified_base 7: mod_base = OTHER; note = Nucleotide with phosphorothioate linkage
  modified_base 8: mod_base = OTHER; note = Nucleotide with phosphorothioate linkage
  modified_base 9: mod_base = OTHER; note = Nucleotide with phosphorothioate linkage
  modified_base 10: mod_base = OTHER; note = Nucleotide with phosphorothioate linkage
  modified_base 11: mod_base = OTHER; note = Nucleotide with phosphorothioate linkage
  modified_base 12: mod_base = OTHER; note = Nucleotide with phosphorothioate linkage
  modified_base 13: mod_base = OTHER; note = Nucleotide with phosphorothioate linkage
  modified_base 14: mod_base = OTHER; note = Nucleotide with phosphorothioate linkage
  modified_base 15: mod_base = OTHER; note = Locked nucleic acid with phosphorothioate linkage
  modified_base 16: mod_base = OTHER; note = Locked nucleic acid with phosphorothioate linkage
  modified_base 17: mod_base = OTHER; note = Locked nucleic acid
cttggagggatgaggat

SEQ ID NO: 541 - DNA, 17 bp, synthetic construct
  source 1..17: mol_type = other DNA
  modified_base 1: mod_base = OTHER; note = Locked nucleic acid with phosphorothioate linkage
  modified_base 2: mod_base = OTHER; note = Locked 5-methylcytosine with phosphorothioate linkage
  modified_base 3: mod_base = OTHER; note = Locked nucleic acid with phosphorothioate linkage
  modified_base 4: mod_base = OTHER; note = 5-methylcytosine with phosphorothioate linkage
  modified_base 5: mod_base = OTHER; note = 5-methylcytosine with phosphorothioate linkage
  modified_base 6: mod_base = OTHER; note = Nucleotide with phosphorothioate linkage
  modified_base 7: mod_base = OTHER; note = Nucleotide with phosphorothioate linkage
  modified_base 8: mod_base = OTHER; note = Nucleotide with phosphorothioate linkage
  modified_base 9: mod_base = OTHER; note = 5-methylcytosine with phosphorothioate linkage
  modified_base 10: mod_base = OTHER; note = Nucleotide with phosphorothioate linkage
  modified_base 11: mod_base = OTHER; note = Nucleotide with phosphorothioate linkage
  modified_base 12: mod_base = OTHER; note = Nucleotide with phosphorothioate linkage
  modified_base 13: mod_base = OTHER; note = 5-methylcytosine with phosphorothioate linkage
  modified_base 14: mod_base = OTHER; note = Nucleotide with phosphorothioate linkage
  modified_base 15: mod_base = OTHER; note = Locked nucleic acid with phosphorothioate linkage
  modified_base 16: mod_base = OTHER; note = Locked 5-methylcytosine with phosphorothioate linkage
  modified_base 17: mod_base = OTHER; note = Locked nucleic acid
acaccagtctagctgct

SEQ ID NO: 542 - DNA, 17 bp, synthetic construct
  source 1..17: mol_type = other DNA
  modified_base 1: mod_base = OTHER; note = Locked nucleic acid with phosphorothioate linkage
  modified_base 2: mod_base = OTHER; note = Locked nucleic acid with phosphorothioate linkage
  modified_base 3: mod_base = OTHER; note = Locked nucleic acid with phosphorothioate linkage
  modified_base 4: mod_base = OTHER; note = Nucleotide with phosphorothioate linkage
  modified_base 5: mod_base = OTHER; note = Nucleotide with phosphorothioate linkage
  modified_base 6: mod_base = OTHER; note = 5-methylcytosine with phosphorothioate linkage
  modified_base 7: mod_base = OTHER; note = Nucleotide with phosphorothioate linkage
  modified_base 8: mod_base = OTHER; note = 5-methylcytosine with phosphorothioate linkage
  modified_base 9: mod_base = OTHER; note = Nucleotide with phosphorothioate linkage
  modified_base 10: mod_base = OTHER; note = 5-methylcytosine with phosphorothioate linkage
  modified_base 11: mod_base = OTHER; note = 5-methylcytosine with phosphorothioate linkage
  modified_base 12: mod_base = OTHER; note = Nucleotide with phosphorothioate linkage
  modified_base 13: mod_base = OTHER; note = Nucleotide with phosphorothioate linkage
  modified_base 14: mod_base = OTHER; note = Nucleotide with phosphorothioate linkage
  modified_base 15: mod_base = OTHER; note = Locked 5-methylcytosine with phosphorothioate linkage
  modified_base 16: mod_base = OTHER; note = Locked nucleic acid with phosphorothioate linkage
  modified_base 17: mod_base = OTHER; note = Locked nucleic acid
gttgtcacaccagtcta

SEQ ID NO: 543 - DNA, 17 bp, synthetic construct
  source 1..17: mol_type = other DNA
  modified_base 1: mod_base = OTHER; note = Locked nucleic acid with phosphorothioate linkage
  modified_base 2: mod_base = OTHER; note = Locked nucleic acid with phosphorothioate linkage
  modified_base 3: mod_base = OTHER; note = Locked nucleic acid with phosphorothioate linkage
  modified_base 4: mod_base = OTHER; note = Nucleotide with phosphorothioate linkage
  modified_base 5: mod_base = OTHER; note = Nucleotide with phosphorothioate linkage
  modified_base 6: mod_base = OTHER; note = Nucleotide with phosphorothioate linkage
  modified_base 7: mod_base = OTHER; note = 5-methylcytosine with phosphorothioate linkage
  modified_base 8: mod_base = OTHER; note = Nucleotide with phosphorothioate linkage
  modified_base 9: mod_base = OTHER; note = 5-methylcytosine with phosphorothioate linkage
  modified_base 10: mod_base = OTHER; note = Nucleotide with phosphorothioate linkage
  modified_base 11: mod_base = OTHER; note = 5-methylcytosine with phosphorothioate linkage
  modified_base 12: mod_base = OTHER; note = 5-methylcytosine with phosphorothioate linkage
  modified_base 13: mod_base = OTHER; note = Nucleotide with phosphorothioate linkage
  modified_base 14: mod_base = OTHER; note = Nucleotide with phosphorothioate linkage
  modified_base 15: mod_base = OTHER; note = Locked nucleic acid with phosphorothioate linkage
  modified_base 16: mod_base = OTHER; note = Locked 5-methylcytosine with phosphorothioate linkage
  modified_base 17: mod_base = OTHER; note = Locked nucleic acid
ggttgtcacaccagtct

SEQ ID NO: 544 - DNA, 18 bp, synthetic construct
  source 1..18: mol_type = other DNA
  modified_base 1: mod_base = OTHER; note = Locked nucleic acid with phosphorothioate linkage
  modified_base 2: mod_base = OTHER; note = Locked nucleic acid with phosphorothioate linkage
  modified_base 3: mod_base = OTHER; note = Locked nucleic acid with phosphorothioate linkage
  modified_base 4: mod_base = OTHER; note = Nucleotide with phosphorothioate linkage
  modified_base 5: mod_base = OTHER; note = 5-methylcytosine with phosphorothioate linkage
  modified_base 6: mod_base = OTHER; note = Nucleotide with phosphorothioate linkage
  modified_base 7: mod_base = OTHER; note = Nucleotide with phosphorothioate linkage
  modified_base 8: mod_base = OTHER; note = Nucleotide with phosphorothioate linkage
  modified_base 9: mod_base = OTHER; note = Nucleotide with phosphorothioate linkage
  modified_base 10: mod_base = OTHER; note = Nucleotide with phosphorothioate linkage
  modified_base 11: mod_base = OTHER; note = Nucleotide with phosphorothioate linkage
  modified_base 12: mod_base = OTHER; note = Nucleotide with phosphorothioate linkage
  modified_base 13: mod_base = OTHER; note = 5-methylcytosine with phosphorothioate linkage
  modified_base 14: mod_base = OTHER; note = Nucleotide with phosphorothioate linkage
  modified_base 15: mod_base = OTHER; note = 5-methylcytosine with phosphorothioate linkage
  modified_base 16: mod_base = OTHER; note = Locked nucleic acid with phosphorothioate linkage
  modified_base 17: mod_base = OTHER; note = Locked 5-methylcytosine with phosphorothioate linkage
  modified_base 18: mod_base = OTHER; note = Locked 5-methylcytosine
aaaacaggttgtcacacc

SEQ ID NO: 545 - DNA, 18 bp, synthetic construct
  source 1..18: mol_type = other DNA
  modified_base 1: mod_base = OTHER; note = Locked nucleic acid with phosphorothioate linkage
  modified_base 2: mod_base = OTHER; note = Locked nucleic acid with phosphorothioate linkage
  modified_base 3: mod_base = OTHER; note = Locked nucleic acid with phosphorothioate linkage
  modified_base 4: mod_base = OTHER; note = Nucleotide with phosphorothioate linkage
  modified_base 5: mod_base = OTHER; note = Nucleotide with phosphorothioate linkage
  modified_base 6: mod_base = OTHER; note = 5-methylcytosine with phosphorothioate linkage
  modified_base 7: mod_base = OTHER; note = Nucleotide with phosphorothioate linkage
  modified_base 8: mod_base = OTHER; note = Nucleotide with phosphorothioate linkage
  modified_base 9: mod_base = OTHER; note = Nucleotide with phosphorothioate linkage
  modified_base 10: mod_base = OTHER; note = Nucleotide with phosphorothioate linkage
  modified_base 11: mod_base = OTHER; note = Nucleotide with phosphorothioate linkage
  modified_base 12: mod_base = OTHER; note = Nucleotide with phosphorothioate linkage
  modified_base 13: mod_base = OTHER; note = Nucleotide with phosphorothioate linkage
  modified_base 14: mod_base = OTHER; note = 5-methylcytosine with phosphorothioate linkage
  modified_base 15: mod_base = OTHER; note = Nucleotide with phosphorothioate linkage
  modified_base 16: mod_base = OTHER; note = Locked 5-methylcytosine with phosphorothioate linkage
  modified_base 17: mod_base = OTHER; note = Locked nucleic acid with phosphorothioate linkage
  modified_base 18: mod_base = OTHER; note = Locked 5-methylcytosine
aaaaacaggttgtcacac

SEQ ID NO: 546 - DNA, 18 bp, synthetic construct
  source 1..18: mol_type = other DNA
  modified_base 1: mod_base = OTHER; note = Locked nucleic acid with phosphorothioate linkage
  modified_base 2: mod_base = OTHER; note = Locked 5-methylcytosine with phosphorothioate linkage
  modified_base 3: mod_base = OTHER; note = Locked nucleic acid with phosphorothioate linkage
  modified_base 4: mod_base = OTHER; note = Nucleotide with phosphorothioate linkage
  modified_base 5: mod_base = OTHER; note = Nucleotide with phosphorothioate linkage
  modified_base 6: mod_base = OTHER; note = Nucleotide with phosphorothioate linkage
  modified_base 7: mod_base = OTHER; note = Nucleotide with phosphorothioate linkage
  modified_base 8: mod_base = OTHER; note = Nucleotide with phosphorothioate linkage
  modified_base 9: mod_base = OTHER; note = Nucleotide with phosphorothioate linkage
  modified_base 10: mod_base = OTHER; note = Nucleotide with phosphorothioate linkage
  modified_base 11: mod_base = OTHER; note = Nucleotide with phosphorothioate linkage
  modified_base 12: mod_base = OTHER; note = 5-methylcytosine with phosphorothioate linkage
  modified_base 13: mod_base = OTHER; note = Nucleotide with phosphorothioate linkage
  modified_base 14: mod_base = OTHER; note = Nucleotide with phosphorothioate linkage
  modified_base 15: mod_base = OTHER; note = Nucleotide with phosphorothioate linkage
  modified_base 16: mod_base = OTHER; note = Locked nucleic acid with phosphorothioate linkage
  modified_base 17: mod_base = OTHER; note = Locked 5-methylcytosine with phosphorothioate linkage
  modified_base 18: mod_base = OTHER; note = Locked nucleic acid
tctattagatgctttgca

SEQ ID NO: 547 - DNA, 18 bp, synthetic construct
  source 1..18: mol_type = other DNA
  modified_base 1: mod_base = OTHER; note = Locked nucleic acid with phosphorothioate linkage
  modified_base 2: mod_base = OTHER; note = Locked 5-methylcytosine with phosphorothioate linkage
  modified_base 3: mod_base = OTHER; note = Locked nucleic acid with phosphorothioate linkage
  modified_base 4: mod_base = OTHER; note = Nucleotide with phosphorothioate linkage
  modified_base 5: mod_base = OTHER; note = Nucleotide with phosphorothioate linkage
  modified_base 6: mod_base = OTHER; note = 5-methylcytosine with phosphorothioate linkage
  modified_base 7: mod_base = OTHER; note = Nucleotide with phosphorothioate linkage
  modified_base 8: mod_base = OTHER; note = Nucleotide with phosphorothioate linkage
  modified_base 9: mod_base = OTHER; note = Nucleotide with phosphorothioate linkage
  modified_base 10: mod_base = OTHER; note = Nucleotide with phosphorothioate linkage
  modified_base 11: mod_base = OTHER; note = Nucleotide with phosphorothioate linkage
  modified_base 12: mod_base = OTHER; note = Nucleotide with phosphorothioate linkage
  modified_base 13: mod_base = OTHER; note = Nucleotide with phosphorothioate linkage
  modified_base 14: mod_base = OTHER; note = Nucleotide with phosphorothioate linkage
  modified_base 15: mod_base = OTHER; note = Nucleotide with phosphorothioate linkage
  modified_base 16: mod_base = OTHER; note = Locked 5-methylcytosine with phosphorothioate linkage
  modified_base 17: mod_base = OTHER; note = Locked nucleic acid with phosphorothioate linkage
  modified_base 18: mod_base = OTHER; note = Locked nucleic acid
gcgttctattagatgctt

SEQ ID NO: 548 - DNA, 18 bp, synthetic construct
  source 1..18: mol_type = other DNA
  modified_base 1: mod_base = OTHER; note = Locked nucleic acid with phosphorothioate linkage
  modified_base 2: mod_base = OTHER; note = Locked nucleic acid with phosphorothioate linkage
  modified_base 3: mod_base = OTHER; note = Locked 5-methylcytosine with phosphorothioate linkage
  modified_base 4: mod_base = OTHER; note = Nucleotide with phosphorothioate linkage
  modified_base 5: mod_base = OTHER; note = Nucleotide with phosphorothioate linkage
  modified_base 6: mod_base = OTHER; note = Nucleotide with phosphorothioate linkage
  modified_base 7: mod_base = OTHER; note = 5-methylcytosine with phosphorothioate linkage
  modified_base 8: mod_base = OTHER; note = Nucleotide with phosphorothioate linkage
  modified_base 9: mod_base = OTHER; note = Nucleotide with phosphorothioate linkage
  modified_base 10: mod_base = OTHER; note = Nucleotide with phosphorothioate linkage
  modified_base 11: mod_base = OTHER; note = Nucleotide with phosphorothioate linkage
  modified_base 12: mod_base = OTHER; note = Nucleotide with phosphorothioate linkage
  modified_base 13: mod_base = OTHER; note = Nucleotide with phosphorothioate linkage
  modified_base 14: mod_base = OTHER; note = Nucleotide with phosphorothioate linkage
  modified_base 15: mod_base = OTHER; note = Nucleotide with phosphorothioate linkage
  modified_base 16: mod_base = OTHER; note = Locked nucleic acid with phosphorothioate linkage
  modified_base 17: mod_base = OTHER; note = Locked 5-methylcytosine with phosphorothioate linkage
  modified_base 18: mod_base = OTHER; note = Locked nucleic acid
agcgttctattagatgct

SEQ ID NO: 549 - DNA, 18 bp, synthetic construct
  source 1..18: mol_type = other DNA
  modified_base 1: mod_base = OTHER; note = Locked nucleic acid with phosphorothioate linkage
  modified_base 2: mod_base = OTHER; note = Locked nucleic acid with phosphorothioate linkage
  modified_base 3: mod_base = OTHER; note = Locked nucleic acid with phosphorothioate linkage
  modified_base 4: mod_base = OTHER; note = Nucleotide with phosphorothioate linkage
  modified_base 5: mod_base = OTHER; note = Nucleotide with phosphorothioate linkage
  modified_base 6: mod_base = OTHER; note = 5-methylcytosine with phosphorothioate linkage
  modified_base 7: mod_base = OTHER; note = Nucleotide with phosphorothioate linkage
  modified_base 8: mod_base = OTHER; note = Nucleotide with phosphorothioate linkage
  modified_base 9: mod_base = OTHER; note = Nucleotide with phosphorothioate linkage
  modified_base 10: mod_base = OTHER; note = 5-methylcytosine with phosphorothioate linkage
  modified_base 11: mod_base = OTHER; note = Nucleotide with phosphorothioate linkage
  modified_base 12: mod_base = OTHER; note = Nucleotide with phosphorothioate linkage
  modified_base 13: mod_base = OTHER; note = Nucleotide with phosphorothioate linkage
  modified_base 14: mod_base = OTHER; note = Nucleotide with phosphorothioate linkage
  modified_base 15: mod_base = OTHER; note = Nucleotide with phosphorothioate linkage
  modified_base 16: mod_base = OTHER; note = Locked nucleic acid with phosphorothioate linkage
  modified_base 17: mod_base = OTHER; note = Locked nucleic acid with phosphorothioate linkage
  modified_base 18: mod_base = OTHER; note = Locked nucleic acid
agtagcgttctattagat

SEQ ID NO: 550 - DNA, 18 bp, synthetic construct
  source 1..18: mol_type = other DNA
  modified_base 1: mod_base = OTHER; note = Locked nucleic acid with phosphorothioate linkage
  modified_base 2: mod_base = OTHER; note = Locked nucleic acid with phosphorothioate linkage
  modified_base 3: mod_base = OTHER; note = Locked nucleic acid with phosphorothioate linkage
  modified_base 4: mod_base = OTHER; note = Nucleotide with phosphorothioate linkage
  modified_base 5: mod_base = OTHER; note = Nucleotide with phosphorothioate linkage
  modified_base 6: mod_base = OTHER; note = Nucleotide with phosphorothioate linkage
  modified_base 7: mod_base = OTHER; note = Nucleotide with phosphorothioate linkage
  modified_base 8: mod_base = OTHER; note = Nucleotide with phosphorothioate linkage
  modified_base 9: mod_base = OTHER; note = 5-methylcytosine with phosphorothioate linkage
  modified_base 10: mod_base = OTHER; note = Nucleotide with phosphorothioate linkage
  modified_base 11: mod_base = OTHER; note = Nucleotide with phosphorothioate linkage
  modified_base 12: mod_base = OTHER; note = Nucleotide with phosphorothioate linkage
  modified_base 13: mod_base = OTHER; note = 5-methylcytosine with phosphorothioate linkage
  modified_base 14: mod_base = OTHER; note = Nucleotide with phosphorothioate linkage
  modified_base 15: mod_base = OTHER; note = Nucleotide with phosphorothioate linkage
  modified_base 16: mod_base = OTHER; note = Locked nucleic acid with phosphorothioate linkage
  modified_base 17: mod_base = OTHER; note = Locked nucleic acid with phosphorothioate linkage
  modified_base 18: mod_base = OTHER; note = Locked nucleic acid
ggtagtagcgttctatta

SEQ ID NO: 551 - DNA, 18 bp, synthetic construct
  source 1..18: mol_type = other DNA
  modified_base 1: mod_base = OTHER; note = Locked nucleic acid with phosphorothioate linkage
  modified_base 2: mod_base = OTHER; note = Locked nucleic acid with phosphorothioate linkage
  modified_base 3: mod_base = OTHER; note = Locked nucleic acid with phosphorothioate linkage
  modified_base 4: mod_base = OTHER; note = Nucleotide with phosphorothioate linkage
  modified_base 5: mod_base = OTHER; note = Nucleotide with phosphorothioate linkage
  modified_base 6: mod_base = OTHER; note = Nucleotide with phosphorothioate linkage
  modified_base 7: mod_base = OTHER; note = Nucleotide with phosphorothioate linkage
  modified_base 8: mod_base = OTHER; note = Nucleotide with phosphorothioate linkage
  modified_base 9: mod_base = OTHER; note = Nucleotide with phosphorothioate linkage
  modified_base 10: mod_base = OTHER; note = 5-methylcytosine with phosphorothioate linkage
  modified_base 11: mod_base = OTHER; note = Nucleotide with phosphorothioate linkage
  modified_base 12: mod_base = OTHER; note = Nucleotide with phosphorothioate linkage
  modified_base 13: mod_base = OTHER; note = Nucleotide with phosphorothioate linkage
  modified_base 14: mod_base = OTHER; note = 5-methylcytosine with phosphorothioate linkage
  modified_base 15: mod_base = OTHER; note = Nucleotide with phosphorothioate linkage
  modified_base 16: mod_base = OTHER; note = Locked nucleic acid with phosphorothioate linkage
  modified_base 17: mod_base = OTHER; note = Locked nucleic acid with phosphorothioate linkage
  modified_base 18: mod_base = OTHER; note = Locked nucleic acid
tggtagtagcgttctatt

SEQ ID NO: 552 - DNA, 18 bp, synthetic construct
  source 1..18: mol_type = other DNA
  modified_base 1: mod_base = OTHER; note = Locked nucleic acid with phosphorothioate linkage
  modified_base 2: mod_base = OTHER; note = Locked nucleic acid with phosphorothioate linkage
  modified_base 3: mod_base = OTHER; note = Locked nucleic acid with phosphorothioate linkage
  modified_base 4: mod_base = OTHER; note = Nucleotide with phosphorothioate linkage
  modified_base 5: mod_base = OTHER; note = Nucleotide with phosphorothioate linkage
  modified_base 6: mod_base = OTHER; note = Nucleotide with phosphorothioate linkage
  modified_base 7: mod_base = OTHER; note = Nucleotide with phosphorothioate linkage
  modified_base 8: mod_base = OTHER; note = Nucleotide with phosphorothioate linkage
  modified_base 9: mod_base = OTHER; note = Nucleotide with phosphorothioate linkage
  modified_base 10: mod_base = OTHER; note = Nucleotide with phosphorothioate linkage
  modified_base 11: mod_base = OTHER; note = 5-methylcytosine with phosphorothioate linkage
  modified_base 12: mod_base = OTHER; note = Nucleotide with phosphorothioate linkage
  modified_base 13: mod_base = OTHER; note = Nucleotide with phosphorothioate linkage
  modified_base 14: mod_base = OTHER; note = Nucleotide with phosphorothioate linkage
  modified_base 15: mod_base = OTHER; note = 5-methylcytosine with phosphorothioate linkage
  modified_base 16: mod_base = OTHER; note = Locked nucleic acid with phosphorothioate linkage
  modified_base 17: mod_base = OTHER; note = Locked nucleic acid with phosphorothioate linkage
  modified_base 18: mod_base = OTHER; note = Locked nucleic acid
gtggtagtagcgttctat

SEQ ID NO: 553 - DNA, 18 bp, synthetic construct
  source 1..18: mol_type = other DNA
  modified_base 1: mod_base = OTHER; note = Locked nucleic acid with phosphorothioate linkage
  modified_base 2: mod_base = OTHER; note = Locked nucleic acid with phosphorothioate linkage
  modified_base 3: mod_base = OTHER; note = Locked 5-methylcytosine with phosphorothioate linkage
  modified_base 4: mod_base = OTHER; note = Nucleotide with phosphorothioate linkage
  modified_base 5: mod_base = OTHER; note = Nucleotide with phosphorothioate linkage
  modified_base 6: mod_base = OTHER; note = Nucleotide with phosphorothioate linkage
  modified_base 7: mod_base = OTHER; note = 5-methylcytosine with phosphorothioate linkage
  modified_base 8: mod_base = OTHER; note = Nucleotide with phosphorothioate linkage
  modified_base 9: mod_base = OTHER; note = Nucleotide with phosphorothioate linkage
  modified_base 10: mod_base = OTHER; note = Nucleotide with phosphorothioate linkage
  modified_base 11: mod_base = OTHER; note = 5-methylcytosine with phosphorothioate linkage
  modified_base 12: mod_base = OTHER; note = Nucleotide with phosphorothioate linkage
  modified_base 13: mod_base = OTHER; note = Nucleotide with phosphorothioate linkage
  modified_base 14: mod_base = OTHER; note = 5-methylcytosine with phosphorothioate linkage
  modified_base 15: mod_base = OTHER; note = Nucleotide with phosphorothioate linkage
  modified_base 16: mod_base = OTHER; note = Locked nucleic acid with phosphorothioate linkage
  modified_base 17: mod_base = OTHER; note = Locked nucleic acid with phosphorothioate linkage
  modified_base 18: mod_base = OTHER; note = Locked nucleic acid
ttcgtgcaggcttcattt

SEQ ID NO: 554 - DNA, 18 bp, synthetic construct
  source 1..18: mol_type = other DNA
  modified_base 1: mod_base = OTHER; note = Locked nucleic acid with phosphorothioate linkage
  modified_base 2: mod_base = OTHER; note = Locked nucleic acid with phosphorothioate linkage
  modified_base 3: mod_base = OTHER; note = Locked nucleic acid with phosphorothioate linkage
  modified_base 4: mod_base = OTHER; note = 5-methylcytosine with phosphorothioate linkage
  modified_base 5: mod_base = OTHER; note = Nucleotide with phosphorothioate linkage
  modified_base 6: mod_base = OTHER; note = Nucleotide with phosphorothioate linkage
  modified_base 7: mod_base = OTHER; note = Nucleotide with phosphorothioate linkage
  modified_base 8: mod_base = OTHER; note = 5-methylcytosine with phosphorothioate linkage
  modified_base 9: mod_base = OTHER; note = Nucleotide with phosphorothioate linkage
  modified_base 10: mod_base = OTHER; note = Nucleotide with phosphorothioate linkage
  modified_base 11: mod_base = OTHER; note = Nucleotide with phosphorothioate linkage
  modified_base 12: mod_base = OTHER; note = 5-methylcytosine with phosphorothioate linkage
  modified_base 13: mod_base = OTHER; note = Nucleotide with phosphorothioate linkage
  modified_base 14: mod_base = OTHER; note = Nucleotide with phosphorothioate linkage
  modified_base 15: mod_base = OTHER; note = 5-methylcytosine with phosphorothioate linkage
  modified_base 16: mod_base = OTHER; note = Locked nucleic acid with phosphorothioate linkage
  modified_base 17: mod_base = OTHER; note = Locked nucleic acid with phosphorothioate linkage
  modified_base 18: mod_base = OTHER; note = Locked nucleic acid
attcgtgcaggcttcatt

SEQ ID NO: 555 - DNA, 18 bp, synthetic construct
  source 1..18: mol_type = other DNA
  modified_base 1: mod_base = OTHER; note = Locked nucleic acid with phosphorothioate linkage
  modified_base 2: mod_base = OTHER; note = Locked nucleic acid with phosphorothioate linkage
  modified_base 3: mod_base = OTHER; note = Locked nucleic acid with phosphorothioate linkage
  modified_base 4: mod_base = OTHER; note = Nucleotide with phosphorothioate linkage
  modified_base 5: mod_base = OTHER; note = Nucleotide with phosphorothioate linkage
  modified_base 6: mod_base = OTHER; note = Nucleotide with phosphorothioate linkage
  modified_base 7: mod_base = OTHER; note = Nucleotide with phosphorothioate linkage
  modified_base 8: mod_base = OTHER; note = Nucleotide with phosphorothioate linkage
  modified_base 9: mod_base = OTHER; note = Nucleotide with phosphorothioate linkage
  modified_base 10: mod_base = OTHER; note = Nucleotide with phosphorothioate linkage
  modified_base 11: mod_base = OTHER; note = Nucleotide with phosphorothioate linkage
  modified_base 12: mod_base = OTHER; note = Nucleotide with phosphorothioate linkage
  modified_base 13: mod_base = OTHER; note = Nucleotide with phosphorothioate linkage
  modified_base 14: mod_base = OTHER; note = Nucleotide with phosphorothioate linkage
  modified_base 15: mod_base = OTHER; note = 5-methylcytosine with phosphorothioate linkage
  modified_base 16: mod_base = OTHER; note = Locked nucleic acid with phosphorothioate linkage
  modified_base 17: mod_base = OTHER; note = Locked 5-methylcytosine with phosphorothioate linkage
  modified_base 18: mod_base = OTHER; note = Locked nucleic acid
ggagggatgaggatcaca

SEQ ID NO: 556 - DNA, 18 bp, synthetic construct
  source 1..18: mol_type = other DNA
  modified_base 1: mod_base = OTHER; note = Locked nucleic acid with phosphorothioate linkage
  modified_base 2: mod_base = OTHER; note = Locked nucleic acid with phosphorothioate linkage
  modified_base 3: mod_base = OTHER; note = Locked nucleic acid with phosphorothioate linkage
  modified_base 4: mod_base = OTHER; note = Nucleotide with phosphorothioate linkage
  modified_base 5: mod_base = OTHER; note = Nucleotide with phosphorothioate linkage
  modified_base 6: mod_base = OTHER; note = Nucleotide with phosphorothioate linkage
  modified_base 7: mod_base = OTHER; note = Nucleotide with phosphorothioate linkage
  modified_base 8: mod_base = OTHER; note = Nucleotide with phosphorothioate linkage
  modified_base 9: mod_base = OTHER; note = Nucleotide with phosphorothioate linkage
  modified_base 10: mod_base = OTHER; note = Nucleotide with phosphorothioate linkage
  modified_base 11: mod_base = OTHER; note = Nucleotide with phosphorothioate linkage
  modified_base 12: mod_base = OTHER; note = Nucleotide with phosphorothioate linkage
  modified_base 13: mod_base = OTHER; note = Nucleotide with phosphorothioate linkage
  modified_base 14: mod_base = OTHER; note = Nucleotide with phosphorothioate linkage
  modified_base 15: mod_base = OTHER; note = Nucleotide with phosphorothioate linkage
  modified_base 16: mod_base = OTHER; note = Locked nucleic acid with phosphorothioate linkage
  modified_base 17: mod_base = OTHER; note = Locked 5-methylcytosine with phosphorothioate linkage
  modified_base 18: mod_base = OTHER; note = Locked nucleic acid
ttggagggatgaggatca

SEQ ID NO: 557 - DNA, 18 bp, synthetic construct
  source 1..18: mol_type = other DNA
  modified_base 1: mod_base = OTHER; note = Locked 5-methylcytosine with phosphorothioate linkage
  modified_base 2: mod_base = OTHER; note = Locked nucleic acid with phosphorothioate linkage
  modified_base 3: mod_base = OTHER; note = Locked nucleic acid with phosphorothioate linkage
  modified_base 4: mod_base = OTHER; note = Nucleotide with phosphorothioate linkage
  modified_base 5: mod_base = OTHER; note = Nucleotide with phosphorothioate linkage
  modified_base 6: mod_base = OTHER; note = Nucleotide with phosphorothioate linkage
  modified_base 7: mod_base = OTHER; note = Nucleotide with phosphorothioate linkage
  modified_base 8: mod_base = OTHER; note = Nucleotide with phosphorothioate linkage
  modified_base 9: mod_base = OTHER; note = Nucleotide with phosphorothioate linkage
  modified_base 10: mod_base = OTHER; note = Nucleotide with phosphorothioate linkage
  modified_base 11: mod_base = OTHER; note = Nucleotide with phosphorothioate linkage
  modified_base 12: mod_base = OTHER; note = Nucleotide with phosphorothioate linkage
  modified_base 13: mod_base = OTHER; note = Nucleotide with phosphorothioate linkage
  modified_base 14: mod_base = OTHER; note = Nucleotide with phosphorothioate linkage
  modified_base 15: mod_base = OTHER; note = Nucleotide with phosphorothioate linkage
  modified_base 16: mod_base = OTHER; note = Locked nucleic acid with phosphorothioate linkage
  modified_base 17: mod_base = OTHER; note = Locked nucleic acid with phosphorothioate linkage
  modified_base 18: mod_base = OTHER; note = Locked 5-methylcytosine
cttggagggatgaggatc

SEQ ID NO: 558 - DNA, 18 bp, synthetic construct
  source 1..18: mol_type = other DNA
  modified_base 1: mod_base = OTHER; note = Locked 5-methylcytosine with phosphorothioate linkage
  modified_base 2: mod_base = OTHER; note = Locked nucleic acid with phosphorothioate linkage
  modified_base 3: mod_base = OTHER; note = Locked 5-methylcytosine with phosphorothioate linkage
  modified_base 4: mod_base = OTHER; note = 5-methylcytosine with phosphorothioate linkage
  modified_base 5: mod_base = OTHER; note = Nucleotide with phosphorothioate linkage
  modified_base 6: mod_base = OTHER; note = Nucleotide with phosphorothioate linkage
  modified_base 7: mod_base = OTHER; note = Nucleotide with phosphorothioate linkage
  modified_base 8: mod_base = OTHER; note = 5-methylcytosine with phosphorothioate linkage
  modified_base 9: mod_base = OTHER; note = Nucleotide with phosphorothioate linkage
  modified_base 10: mod_base = OTHER; note = Nucleotide with phosphorothioate linkage
  modified_base 11: mod_base = OTHER; note = Nucleotide with phosphorothioate linkage
  modified_base 12: mod_base = OTHER; note = Nucleotide with phosphorothioate linkage
  modified_base 13: mod_base = OTHER; note = Nucleotide with phosphorothioate linkage
  modified_base 14: mod_base = OTHER; note = Nucleotide with phosphorothioate linkage
  modified_base 15: mod_base = OTHER; note = Nucleotide with phosphorothioate linkage
  modified_base 16: mod_base = OTHER; note = Locked nucleic acid with phosphorothioate linkage
  modified_base 17: mod_base = OTHER; note = Locked nucleic acid with phosphorothioate linkage
  modified_base 18: mod_base = OTHER; note = Locked nucleic acid
ctcctttcttggagggat

SEQ ID NO: 559 - DNA, 20 bp, synthetic construct
  source 1..20: mol_type = other DNA
  modified_base 1: mod_base = OTHER; note = 2'-O-methoxyethyl modified thymine with phosphorothioate linkage
  modified_base 2: mod_base = OTHER; note = 2'-O-methoxyethyl modified thymine
  modified_base 3: mod_base = OTHER; note = 2'-O-methoxyethyl modified 5-methylcytosine
  modified_base 4: mod_base = OTHER; note = 2'-O-methoxyethyl modified nucleotide with phosphorothioate linkage
  modified_base 5: mod_base = OTHER; note = 5-methylcytosine with phosphorothioate linkage
  modified_base 6: mod_base = OTHER; note = Nucleotide with phosphorothioate linkage
  modified_base 7: mod_base = OTHER; note = Nucleotide with phosphorothioate linkage
  modified_base 8: mod_base = OTHER; note = 5-methylcytosine with phosphorothioate linkage
  modified_base 9: mod_base = OTHER; note = 5-methylcytosine with phosphorothioate linkage
  modified_base 10: mod_base = OTHER; note = Nucleotide with phosphorothioate linkage
  modified_base 11: mod_base = OTHER; note = 5-methylcytosine with phosphorothioate linkage
  modified_base 12: mod_base = OTHER; note = 5-methylcytosine with phosphorothioate linkage
  modified_base 13: mod_base = OTHER; note = Nucleotide with phosphorothioate linkage
  modified_base 14: mod_base = OTHER; note = 5-methylcytosine with phosphorothioate linkage
  modified_base 15: mod_base = OTHER; note = 5-methylcytosine with phosphorothioate linkage
  modified_base 16: mod_base = OTHER; note = 2'-O-methoxyethyl modified nucleotide
  modified_base 17: mod_base = OTHER; note = 2'-O-methoxyethyl modified 5-methylcytosine
  modified_base 18: mod_base = OTHER; note = 2'-O-methoxyethyl modified 5-methylcytosine
  modified_base 19: mod_base = OTHER; note = 2'-O-methoxyethyl modified nucleotide with phosphorothioate linkage
  modified_base 20: mod_base = OTHER; note = 2'-O-methoxyethyl modified nucleotide
  misc_feature 1..4: note = RNA
  misc_feature 5..15: note = DNA
  misc_feature 16..20: note = RNA
ttcgctgccgccaccgccgg

SEQ ID NO: 560 - DNA, 20 bp, synthetic construct
  source 1..20: mol_type = other DNA
  modified_base 1: mod_base = OTHER; note = 2'-O-methoxyethyl modified thymine with phosphorothioate linkage
  modified_base 2: mod_base = OTHER; note = 2'-O-methoxyethyl modified thymine
  modified_base 3: mod_base = OTHER; note = 2'-O-methoxyethyl modified thymine
  modified_base 4: mod_base = OTHER; note = 2'-O-methoxyethyl modified 5-methylcytosine with phosphorothioate linkage
  modified_base 5: mod_base = OTHER; note = Nucleotide with phosphorothioate linkage
  modified_base 6: mod_base = OTHER; note = 5-methylcytosine with phosphorothioate linkage
  modified_base 7: mod_base = OTHER; note = Nucleotide with phosphorothioate linkage
  modified_base 8: mod_base = OTHER; note = Nucleotide with phosphorothioate linkage
  modified_base 9: mod_base = OTHER; note = 5-methylcytosine with phosphorothioate linkage
  modified_base 10: mod_base = OTHER; note = 5-methylcytosine with phosphorothioate linkage
  modified_base 11: mod_base = OTHER; note = Nucleotide with phosphorothioate linkage
  modified_base 12: mod_base = OTHER; note = 5-methylcytosine with phosphorothioate linkage
  modified_base 13: mod_base = OTHER; note = 5-methylcytosine with phosphorothioate linkage
  modified_base 14: mod_base = OTHER; note = Nucleotide with phosphorothioate linkage
  modified_base 15: mod_base = OTHER; note = 5-methylcytosine with phosphorothioate linkage
  modified_base 16: mod_base = OTHER; note = 2'-O-methoxyethyl modified 5-methylcytosine
  modified_base 17: mod_base = OTHER; note = 2'-O-methoxyethyl modified nucleotide
  modified_base 18: mod_base = OTHER; note = 2'-O-methoxyethyl modified 5-methylcytosine
  modified_base 19: mod_base = OTHER; note = 2'-O-methoxyethyl modified 5-methylcytosine with phosphorothioate linkage
  modified_base 20: mod_base = OTHER; note = 2'-O-methoxyethyl modified nucleotide
  misc_feature 1..4: note = RNA
  misc_feature 5..15: note = DNA
  misc_feature 16..20: note = RNA
tttcgctgccgccaccgccg

SEQ ID NO: 561 - DNA, 20 bp, synthetic construct
  source 1..20: mol_type = other DNA
  modified_base 1: mod_base = OTHER; note = 2'-O-methoxyethyl modified 5-methylcytosine with phosphorothioate linkage
  modified_base 2: mod_base = OTHER; note = 2'-O-methoxyethyl modified thymine
  modified_base 3: mod_base = OTHER; note = 2'-O-methoxyethyl modified thymine
  modified_base 4: mod_base = OTHER; note = 2'-O-methoxyethyl modified thymine with phosphorothioate linkage
  modified_base 5: mod_base = OTHER; note = 5-methylcytosine with phosphorothioate linkage
  modified_base 6: mod_base = OTHER; note = Nucleotide with phosphorothioate linkage
  modified_base 7: mod_base = OTHER; note = 5-methylcytosine with phosphorothioate linkage
  modified_base 8: mod_base = OTHER; note = Nucleotide with phosphorothioate linkage
  modified_base 9: mod_base = OTHER; note = Nucleotide with phosphorothioate linkage
  modified_base 10: mod_base = OTHER; note = 5-methylcytosine with phosphorothioate linkage
  modified_base 11: mod_base = OTHER; note = 5-methylcytosine with phosphorothioate linkage
  modified_base 12: mod_base = OTHER; note = Nucleotide with phosphorothioate linkage
  modified_base 13: mod_base = OTHER; note = 5-methylcytosine with phosphorothioate linkage
  modified_base 14: mod_base = OTHER; note = 5-methylcytosine with phosphorothioate linkage
  modified_base 15: mod_base = OTHER; note = Nucleotide with phosphorothioate linkage
  modified_base 16: mod_base = OTHER; note = 2'-O-methoxyethyl modified 5-methylcytosine
  modified_base 17: mod_base = OTHER; note = 2'-O-methoxyethyl modified 5-methylcytosine
  modified_base 18: mod_base = OTHER; note = 2'-O-methoxyethyl modified nucleotide
  modified_base 19: mod_base = OTHER; note = 2'-O-methoxyethyl modified 5-methylcytosine with phosphorothioate linkage
  modified_base 20: mod_base = OTHER; note = 2'-O-methoxyethyl modified 5-methylcytosine
  misc_feature 1..4: note = RNA
  misc_feature 5..15: note = DNA
  misc_feature 16..20: note = RNA
ctttcgctgccgccaccgcc

SEQ ID NO: 562 - DNA, 20 bp, synthetic construct
  source 1..20: mol_type = other DNA
  modified_base 1: mod_base = OTHER; note = 2'-O-methoxyethyl modified 5-methylcytosine with phosphorothioate linkage
  modified_base 2: mod_base = OTHER; note = 2'-O-methoxyethyl modified nucleotide
  modified_base 3: mod_base = OTHER; note = 2'-O-methoxyethyl modified thymine
  modified_base 4: mod_base = OTHER; note = 2'-O-methoxyethyl modified thymine with phosphorothioate linkage
  modified_base 5: mod_base = OTHER; note = 5-methylcytosine with phosphorothioate linkage
  modified_base 6: mod_base = OTHER; note = Nucleotide with phosphorothioate linkage
  modified_base 7: mod_base = OTHER; note = 5-methylcytosine with phosphorothioate linkage
  modified_base 8: mod_base = OTHER; note = Nucleotide with phosphorothioate linkage
  modified_base 9: mod_base = OTHER; note = Nucleotide with phosphorothioate linkage
  modified_base 10: mod_base = OTHER; note = Nucleotide with phosphorothioate linkage
  modified_base 11: mod_base = OTHER; note = 5-methylcytosine with phosphorothioate linkage
  modified_base 12: mod_base = OTHER; note = Nucleotide with phosphorothioate linkage
  modified_base 13: mod_base = OTHER; note = 5-methylcytosine with phosphorothioate linkage
  modified_base 14: mod_base = OTHER; note = Nucleotide with phosphorothioate linkage
  modified_base 15: mod_base = OTHER; note = Nucleotide with phosphorothioate linkage
  modified_base 16: mod_base = OTHER; note = 2'-O-methoxyethyl modified 5-methylcytosine
  modified_base 17: mod_base = OTHER; note = 2'-O-methoxyethyl modified 5-methylcytosine
  modified_base 18: mod_base = OTHER; note = 2'-O-methoxyethyl modified nucleotide
  modified_base 19: mod_base = OTHER; note = 2'-O-methoxyethyl modified 5-methylcytosine with phosphorothioate linkage
  modified_base 20: mod_base = OTHER; note = 2'-O-methoxyethyl modified 5-methylcytosine
  misc_feature 1..4: note = RNA
  misc_feature 5..15: note = DNA
  misc_feature 16..20: note = RNA
cgttctctttcgctgccgcc

SEQ ID NO: 563 - DNA, 17 bp, synthetic construct
  source 1..17: mol_type = other DNA
  modified_base 1: mod_base = OTHER; note = Locked nucleic acid with phosphorothioate linkage
  modified_base 2: mod_base = OTHER; note = Locked nucleic acid with phosphorothioate linkage
  modified_base 3: mod_base = OTHER; note = Locked nucleic acid with phosphorothioate linkage
  modified_base 4: mod_base = OTHER; note = Nucleotide with phosphorothioate linkage
  modified_base 5: mod_base = OTHER; note = Nucleotide with phosphorothioate linkage
  modified_base 6: mod_base = OTHER; note = 5-methylcytosine with phosphorothioate linkage
  modified_base 7: mod_base = OTHER; note = Nucleotide with phosphorothioate linkage
  modified_base 8: mod_base = OTHER; note = Nucleotide with phosphorothioate linkage
  modified_base 9: mod_base = OTHER; note = Nucleotide with phosphorothioate linkage
  modified_base 10: mod_base = OTHER; note = Nucleotide with phosphorothioate linkage
  modified_base 11: mod_base = OTHER; note = Nucleotide with phosphorothioate linkage
  modified_base 12: mod_base = OTHER; note = Nucleotide with phosphorothioate linkage
  modified_base 13: mod_base = OTHER; note = 5-methylcytosine with phosphorothioate linkage
  modified_base 14: mod_base = OTHER; note = Nucleotide with phosphorothioate linkage
  modified_base 15: mod_base = OTHER; note = Locked 5-methylcytosine with phosphorothioate linkage
  modified_base 16: mod_base = OTHER; note = Locked nucleic acid with phosphorothioate linkage
  modified_base 17: mod_base = OTHER; note = Locked nucleic acid
gattacagattacacat

SEQ ID NO: 564 - DNA, 18 bp, synthetic construct
  source 1..18: mol_type = other DNA
  modified_base 1: mod_base = OTHER; note = Locked 5-methylcytosine with phosphorothioate linkage
  modified_base 2: mod_base = OTHER; note = Locked nucleic acid with phosphorothioate linkage
  modified_base 3: mod_base = OTHER; note = Locked nucleic acid with phosphorothioate linkage
  modified_base 4: mod_base = OTHER; note = 5-methylcytosine with phosphorothioate linkage
  modified_base 5: mod_base = OTHER; note = Nucleotide with phosphorothioate linkage
  modified_base 6: mod_base = OTHER; note = Nucleotide with phosphorothioate linkage
  modified_base 7: mod_base = OTHER; note = 5-methylcytosine with phosphorothioate linkage
  modified_base 8: mod_base = OTHER; note = Nucleotide with phosphorothioate linkage
  modified_base 9: mod_base = OTHER; note = Nucleotide with phosphorothioate linkage
  modified_base 10: mod_base = OTHER; note = 5-methylcytosine with phosphorothioate linkage
  modified_base 11: mod_base = OTHER; note = Nucleotide with phosphorothioate linkage
  modified_base 12: mod_base = OTHER; note = Nucleotide with phosphorothioate linkage
  modified_base 13: mod_base = OTHER; note = 5-methylcytosine with phosphorothioate linkage
  modified_base 14: mod_base = OTHER; note = Nucleotide with phosphorothioate linkage
  modified_base 15: mod_base = OTHER; note = Nucleotide with phosphorothioate linkage
  modified_base 16: mod_base = OTHER; note = Locked 5-methylcytosine with phosphorothioate linkage
  modified_base 17: mod_base = OTHER; note = Locked nucleic acid with phosphorothioate linkage
  modified_base 18: mod_base = OTHER; note = Locked nucleic acid
catcatcatcatcatcat

SEQ ID NO: 565 - DNA, 20 bp, synthetic construct
  source 1..20: mol_type = other DNA
  modified_base 1: mod_base = OTHER; note = 2'-O-methoxyethyl modified nucleotide with phosphorothioate linkage
  modified_base 2: mod_base = OTHER; note = 2'-O-methoxyethyl modified 5-methylcytosine
  modified_base 3: mod_base = OTHER; note = 2'-O-methoxyethyl modified nucleotide
  modified_base 4: mod_base = OTHER; note = 2'-O-methoxyethyl modified thymine with phosphorothioate linkage
  modified_base 5: mod_base = OTHER; note = 5-methylcytosine with phosphorothioate linkage
  modified_base 6: mod_base = OTHER; note = Nucleotide with phosphorothioate linkage
  modified_base 7: mod_base = OTHER; note = Nucleotide with phosphorothioate linkage
  modified_base 8: mod_base = OTHER; note = 5-methylcytosine with phosphorothioate linkage
  modified_base 9: mod_base = OTHER; note = Nucleotide with phosphorothioate linkage
  modified_base 10: mod_base = OTHER; note = Nucleotide with phosphorothioate linkage
  modified_base 11: mod_base = OTHER; note = 5-methylcytosine with phosphorothioate linkage
  modified_base 12: mod_base = OTHER; note = Nucleotide with phosphorothioate linkage
  modified_base 13: mod_base = OTHER; note = Nucleotide with phosphorothioate linkage
  modified_base 14: mod_base = OTHER; note = 5-methylcytosine with phosphorothioate linkage
  modified_base 15: mod_base = OTHER; note = Nucleotide with phosphorothioate linkage
  modified_base 16: mod_base = OTHER; note = 2'-O-methoxyethyl modified thymine
  modified_base 17: mod_base = OTHER; note = 2'-O-methoxyethyl modified 5-methylcytosine
  modified_base 18: mod_base = OTHER; note = 2'-O-methoxyethyl modified nucleotide
  modified_base 19: mod_base = OTHER; note = 2'-O-methoxyethyl modified thymine with phosphorothioate linkage
  modified_base 20: mod_base = OTHER; note = 2'-O-methoxyethyl modified 5-methylcytosine
  misc_feature 1..4: note = RNA
  misc_feature 5..15: note = DNA
  misc_feature 16..20: note = RNA
acatcatcatcatcatcatc

SEQ ID NO: 566 - DNA, 20 bp, synthetic construct
  source 1..20: mol_type = other DNA
  modified_base 1: mod_base = OTHER; note = 2'-O-methoxyethyl modified nucleotide with phosphorothioate linkage
  modified_base 2: mod_base = OTHER; note = 2'-O-methoxyethyl modified nucleotide
  modified_base 3: mod_base = OTHER; note = 2'-O-methoxyethyl modified nucleotide
  modified_base 4: mod_base = OTHER; note = 2'-O-methoxyethyl modified thymine with phosphorothioate linkage
  modified_base 5: mod_base = OTHER; note = Nucleotide with phosphorothioate linkage
  modified_base 6: mod_base = OTHER; note = 5-methylcytosine with phosphorothioate linkage
  modified_base 7: mod_base = OTHER; note = Nucleotide with phosphorothioate linkage
  modified_base 8: mod_base = OTHER; note = Nucleotide with phosphorothioate linkage
  modified_base 9: mod_base = OTHER; note = 5-methylcytosine with phosphorothioate linkage
  modified_base 10: mod_base = OTHER; note = Nucleotide with phosphorothioate linkage
  modified_base 11: mod_base = OTHER; note = Nucleotide with phosphorothioate linkage
  modified_base 12: mod_base = OTHER; note = 5-methylcytosine with phosphorothioate linkage
  modified_base 13: mod_base = OTHER; note = Nucleotide with phosphorothioate linkage
  modified_base 14: mod_base = OTHER; note = Nucleotide with phosphorothioate linkage
  modified_base 15: mod_base = OTHER; note = Nucleotide with phosphorothioate linkage
  modified_base 16: mod_base = OTHER; note = 2'-O-methoxyethyl modified 5-methylcytosine
  modified_base 17: mod_base = OTHER; note = 2'-O-methoxyethyl modified 5-methylcytosine
  modified_base 18: mod_base = OTHER; note = 2'-O-methoxyethyl modified thymine
  modified_base 19: mod_base = OTHER; note = 2'-O-methoxyethyl modified thymine with phosphorothioate linkage
  modified_base 20: mod_base = OTHER; note = 2'-O-methoxyethyl modified nucleotide
  misc_feature 1..4: note = RNA
  misc_feature 5..15: note = DNA
  misc_feature 16..20: note = RNA
ggattcaactgctgtccttg

SEQ ID NO: 567 - DNA, 20 bp, synthetic construct
  source 1..20: mol_type = other DNA
  modified_base 1: mod_base = OTHER; note = 2'-O-methoxyethyl modified thymine with phosphorothioate linkage
  modified_base 2: mod_base = OTHER; note = 2'-O-methoxyethyl modified nucleotide
  modified_base 3: mod_base = OTHER; note = 2'-O-methoxyethyl modified nucleotide
  modified_base 4: mod_base = OTHER; note = 2'-O-methoxyethyl modified nucleotide with phosphorothioate linkage
  modified_base 5: mod_base = OTHER; note = 5-methylcytosine with phosphorothioate linkage
  modified_base 6: mod_base = OTHER; note = Nucleotide with phosphorothioate linkage
  modified_base 7: mod_base = OTHER; note = Nucleotide with phosphorothioate linkage
  modified_base 8: mod_base = OTHER; note = Nucleotide with phosphorothioate linkage
  modified_base 9: mod_base = OTHER; note = 5-methylcytosine with phosphorothioate linkage
  modified_base 10: mod_base = OTHER; note = Nucleotide with phosphorothioate linkage
  modified_base 11: mod_base = OTHER; note = 5-methylcytosine with phosphorothioate linkage
  modified_base 12: mod_base = OTHER; note = 5-methylcytosine with phosphorothioate linkage
  modified_base 13: mod_base = OTHER; note = Nucleotide with phosphorothioate linkage
  modified_base 14: mod_base = OTHER; note = Nucleotide with phosphorothioate linkage
  modified_base 15: mod_base = OTHER; note = Nucleotide with phosphorothioate linkage
  modified_base 16: mod_base = OTHER; note = 2'-O-methoxyethyl modified 5-methylcytosine
  modified_base 17: mod_base = OTHER; note = 2'-O-methoxyethyl modified 5-methylcytosine
  modified_base 18: mod_base = OTHER; note = 2'-O-methoxyethyl modified thymine
  modified_base 19: mod_base = OTHER; note = 2'-O-methoxyethyl modified thymine with phosphorothioate linkage
  modified_base 20: mod_base = OTHER; note = 2'-O-methoxyethyl modified nucleotide
  misc_feature 1..4: note = RNA
  misc_feature 5..15: note = DNA
  misc_feature 16..20: note = RNA
tgagctatcacctatccttg